United States Patent Application Publication US 2026/0347866 A1, published November 5, 2026 (application 19/099,663).

The application's sequence listing, which the Patent Office published only in electronic form, follows.

SEQUENCE LISTING (4400 sequences)

SEQ ID NO: 1 - DNA, 4454 bp, Arachis hypogaea
  source 1..4454: mol_type = genomic DNA
tcgtttttatcaaaagcagtaaacttcaaatggtagtttctcattagttcaccgttggatcggcttgaaatttgaactgcgtgtttctctcatcttgttcttcattctggacggtggagatgttgattgaaagtctgcagtgagagaaattggcttcgcaagagaaaaattaggttttccatttttacacagagtagcaatttttgaacggcagtttctcattttttcaccgttggatcgacgtgaaatttggacagtaaattcttcatatcttgttcttcatagttgctgccacattgtgttgtgagtgcttccatactattgttgtattggatatttgtgttatttttgctgatagactctttcaataatgtctaggaaaatagtagataaacaaaagcttaattatgaagaaaaagagaaacttaaacgaaaagataaatgttggttaaaactgttgattattccaatcttttcccaatagaataaattatgccccaattattttatcaatatgttaattaggaatgaacattttggagattgtatcataagttttaattaagaatgtgattactttgtttccatagttggattatcttttgtagaataacgagggtataatctctaatatacatttgtcggccttaggttgtgttattaatgcttctcatacggtaccacaactctgtagctagagcttgcgattatattgaacagaatagagatgatatcaaaaagaaagaaggaacaaattaaacgtatgtgatgtttaaatggatatgaaattttggtcaatgaagacatgtatgatttcgcttgtgatacgcagatacgctaaaaggcaagccaataccgtaaggtaggggtgcatatgtgccgggtgaagtcgggtttgatgtgacccagacccgatccgaaatatacaccgggtttatttattagacccgaacccgaccctagacccgatgaaaccaatacactttcgggccacaattataccgggtaaaaaccgggtgaaaaccgggccattaacattacattacgttgataccttcttgtaagctagcatgtaaaaatatccaaattttcaagactccaaccattatttaacatggtaaaattcacttagaaaaatataacaaaaaccaacccttctttaaaattaaagcataaccacaatccatactaaagcaaaaccacaatcaatactaatattgtctaataataccaaatatttaaatcaatacaaataacacaatattatgcattagtctaaagtcttatgcattctaaacataaaatattaacttatagtcttataatgactaataaaacaaaatattaaagtttacaatacttaaattccacataagaatagtcatgatccatcactaataacacaaaatattaattgtgtatgatgaccgggccaccaggccgacttcgggtgacccgagctatggcccggacccgacccgaaataatgaccgggtctatttttgagacccttacccgaccctaaacccgatgaaatcataccaaattagcccctaaaatgttcgggaccgggccgggccttcgggccgggccgggtctgtgcacccctaccgtaaggatagctgaatgggtgatgatattttatcaaaagacaaaaggaatccatcctgtatgtgcagtggaaccttttcccagacaatggagtgatgaacattatatatatcgccgcgtccatcaccatacatatccaaagcaaaaaatttaacaaatactgaaccccaattgccatgcatattaacacgtacactctctatgtcaatgtgtccaccatgcaccacaatccatccatctcttgtttatctctaagccaagacctagtgttgttgccacctcacatttctcaatttcaacactcgtcaacctgcatgccactccaatgcccaagtgtacatccatatcatcctaacgcaactatataaataccactcacctccctccatcatttcaccatccacactcataataatcatatatattcatcaatcatctatataagtagtagcaggagcaatgagagggagggtttctccactgatgctgttgctagggatccttgtcctggcttcagtttctgcaacgcatgccaagtcatcaccttaccagaagaaaacagagaacccctgcgcccagaggtgcctccagagttgtcaacaggaaccggatgacttgaagcaaaaggcatgcgagtctcgctgcaccaagctcgagtatgatcctcgttgtgtctatgatcctcgaggacacactggcaccaccaaccaacgttcccctccaggggagcggacacgtggccgccaacccggagactacgatgatgaccgccgtcaaccccgaagagaggaaggaggccgatggggaccagctggaccgagggagcgtgaaagagaagaagactggagacaaccaagagaagattggaggcgaccaagtcatcagcagccacggaaaataaggcccgaaggaagagaaggagaacaagagtggggaacaccaggtagccatgtgagggaagaaacatctcggaacaaccctttctacttcccgtcaaggcggtttagcacccgctacgggaaccaaaacggtaggatccgggtcctgcagaggtttgaccaaaggtcaaggcagtttcagaatctccagaatcaccgtattgtgcagatcgaggccaaacctaacactcttgttcttcccaagcacgctgatgctgataacatccttgttatccagcaaggtatcaaatctaattctattctaaactacatatattttgttgcttgatacatatgattcattggattgcagggcaagccaccgtgaccgtagcaaatggcaataacagaaagagctttaatcttgacgagggccatgcactcagaatcccatccggtttcatttcctacatcttgaaccgccatgacaaccagaacctcagagtagctaaaatctccatgcccgttaacacacccggccagtttgaggtacctctttcttctcacatatatattcaagaggaatgttaggaggccagcaacttttgtaatttgtagttatcaaatagtcattagtgatgatattaatgttattaataatgattttaatggtgtaaaattttatctaatggttcatttttttttttttgatacatgttggtcagaatttaacaaattactggtcctagatttttcttatattcaattctcaattatcatcttacatgttgcttcacaggatttcttcccggcgagcagccgagaccaatcatcctacttgcagggcttcagcaggaatacgttggaggccgccttcaatgtaagcaaatgtatcataattatggaattaaaataacgatcatgttataataaacttataatatatatacataggcggaattcaatgagatacggagggtgctgttagaagagaatgcaggaggtgagcaagaggagagagggcagaggcgatggagtactcggagtagtgagaacaatgaaggagtgatagtcaaagtgtcaaaggagcacgttgaagaacttactaagcacgctaaatccgtctcaaagaaaggctccgaagaagagggagatatcaccaacccaatcaacttgagagaaggcgagcccgatctttctaacaactttgggaagttatttgaggtgaagccagacaagaagaacccccagcttcaggacctggacatgatgctcacctgtgtagagatcaaagaaggagctttgatgctcccacacttcaactcaaaggccatggttatcgtcgtcgtcaacaaaggaactggaaaccttgaactcgtggctgtaagaaaagagcaacaacagaggggacggcgggaagaagaggaggacgaagacgaagaagaggagggaagtaacagagaggtgcgtaggtacacagcgaggttgaaggaaggcgatgtgttcatcatgccagcagctcatccagtagccatcaacgcttcctccgaactccatctgcttggcttcggtatcaacgctgaaaacaaccacagaatcttccttgcaggtgataaggacaatgtgatagaccagatagagaagcaagcgaaggatttagcattccctgggtcgggtgaacaagttgagaagctcatcaaaaaccagaaggaatctcactttgtgagtgctcgtcctcaatctcaatctcaatctccgtcgtctcctgagaaagagtctcctgagaaagaggatcaagaggaggaaaaccaaggagggaagggtccactcctttcaattttgaaggcttttaactgagaatggaggcaacttgttatgtatcgataataagatcacgcttttgtactctactatccaaaaacttatcaataaataaaaacgtttgtgcgttgtttctccaagaaa

SEQ ID NO: 2 - protein, 626 aa, Arachis hypogaea
MRGRVSPLMLLLGILVLASVSATHAKSSPYQKKTENPCAQRCLQSCQQEPDDLKQKACESRCTKLEYDPRCVYDPRGHTGTTNQRSPPGERTRGRQPGDYDDDRRQPRREEGGRWGPAGPREREREEDWRQPREDWRRPSHQQPRKIRPEGREGEQEWGTPGSHVREETSRNNPFYFPSRRFSTRYGNQNGRIRVLQRFDQRSRQFQNLQNHRIVQIEAKPNTLVLPKHADADNILVIQQGQATVTVANGNNRKSFNLDEGHALRIPSGFISYILNRHDNQNLRVAKISMPVNTPGQFEDFFPASSRDQSSYLQGFSRNTLEAAFNAEFNEIRRVLLEENAGGEQEERGQRRWSTRSSENNEGVIVKVSKEHVEELTKHAKSVSKKGSEEEGDITNPINLREGEPDLSNNFGKLFEVKPDKKNPQLQDLDMMLTCVEIKEGALMLPHFNSKAMVIVVVNKGTGNLELVAVRKEQQQRGRREEEEDEDEEEEGSNREVRRYTARLKEGDVFIMPAAHPVAINASSELHLLGFGINAENNHRIFLAGDKDNVIDQIEKQAKDLAFPGSGEQVEKLIKNQKESHFVSARPQSQSQSPSSPEKESPEKEDQEEENQGGKGPLLSILKAFN

SEQ ID NO: 3 - DNA, 20 bp, Arachis hypogaea
  source 1..20: mol_type = other DNA
caaaagcagtaaacttcaaa

SEQ ID NO: 4 - DNA, 20 bp, Arachis hypogaea
  source 1..20: mol_type = other DNA
gtttctcattagttcaccgt

SEQ ID NO: 5 - DNA, 20 bp, Arachis hypogaea
  source 1..20: mol_type = other DNA
tcattagttcaccgttggat

SEQ ID NO: 6 - DNA, 20 bp, Arachis hypogaea
  source 1..20: mol_type = other DNA
caaatttcaagccgatccaa

SEQ ID NO: 7 - DNA, 20 bp, Arachis hypogaea
  source 1..20: mol_type = other DNA
tctcatcttgttcttcattc

SEQ ID NO: 8 - DNA, 20 bp, Arachis hypogaea
  source 1..20: mol_type = other DNA
atcttgttcttcattctgga

SEQ ID NO: 9 - DNA, 20 bp, Arachis hypogaea
  source 1..20: mol_type = other DNA
ttgttcttcattctggacgg

SEQ ID NO: 10 - DNA, 20 bp, Arachis hypogaea
  source 1..20: mol_type = other DNA
aagtctgcagtgagagaaat

SEQ ID NO: 11 - DNA, 20 bp, Arachis hypogaea
  source 1..20: mol_type = other DNA
ggcttcgcaagagaaaaatt

SEQ ID NO: 12 - DNA, 20 bp, Arachis hypogaea
  source 1..20: mol_type = other DNA
attgctactctgtgtaaaaa

SEQ ID NO: 13 - DNA, 20 bp, Arachis hypogaea
  source 1..20: mol_type = other DNA
acagagtagcaatttttgaa

SEQ ID NO: 14 - DNA, 20 bp, Arachis hypogaea
  source 1..20: mol_type = other DNA
gtttctcattttttcaccgt

SEQ ID NO: 15 - DNA, 20 bp, Arachis hypogaea
  source 1..20: mol_type = other DNA
caaatttcacgtcgatccaa

SEQ ID NO: 16 - DNA, 20 bp, Arachis hypogaea
  source 1..20: mol_type = other DNA
cgttggatcgacgtgaaatt

SEQ ID NO: 17 - DNA, 20 bp, Arachis hypogaea
  source 1..20: mol_type = other DNA
gaagcactcacaacacaatg

SEQ ID NO: 18 - DNA, 20 bp, Arachis hypogaea
  source 1..20: mol_type = other DNA
tatccaatacaacaatagta

SEQ ID NO: 19 - DNA, 20 bp, Arachis hypogaea
  source 1..20: mol_type = other DNA
cttccatactattgttgtat

SEQ ID NO: 20 - DNA, 20 bp, Arachis hypogaea
  source 1..20: mol_type = other DNA
agactctttcaataatgtct

SEQ ID NO: 21 - DNA, 20 bp, Arachis hypogaea
  source 1..20: mol_type = other DNA
ttaaacgaaaagataaatgt

SEQ ID NO: 22 - DNA, 20 bp, Arachis hypogaea
  source 1..20: mol_type = other DNA
ttattctattgggaaaagat

SEQ ID NO: 23 - DNA, 20 bp, Arachis hypogaea
  source 1..20: mol_type = other DNA
ggggcataatttattctatt

SEQ ID NO: 24 - DNA, 20 bp, Arachis hypogaea
  source 1..20: mol_type = other DNA
tggggcataatttattctat

SEQ ID NO: 25 - DNA, 20 bp, Arachis hypogaea
  source 1..20: mol_type = other DNA
acatattgataaaataattg

SEQ ID NO: 26 - DNA, 20 bp, Arachis hypogaea
  source 1..20: mol_type = other DNA
aacatattgataaaataatt

SEQ ID NO: 27 - DNA, 20 bp, Arachis hypogaea
  source 1..20: mol_type = other DNA
taacatattgataaaataat

SEQ ID NO: 28 - DNA, 20 bp, Arachis hypogaea
  source 1..20: mol_type = other DNA
attttatcaatatgttaatt

SEQ ID NO: 29 - DNA, 20 bp, Arachis hypogaea
  source 1..20: mol_type = other DNA
ttaattaggaatgaacattt

SEQ ID NO: 30 - DNA, 20 bp, Arachis hypogaea
  source 1..20: mol_type = other DNA
gattactttgtttccatagt

SEQ ID NO: 31 - DNA, 20 bp, Arachis hypogaea
  source 1..20: mol_type = other DNA
tacaaaagataatccaacta

SEQ ID NO: 32 - DNA, 20 bp, Arachis hypogaea
  source 1..20: mol_type = other DNA
ttatcttttgtagaataacg

SEQ ID NO: 33 - DNA, 20 bp, Arachis hypogaea
  source 1..20: mol_type = other DNA
tatcttttgtagaataacga

SEQ ID NO: 34 - DNA, 20 bp, Arachis hypogaea
  source 1..20: mol_type = other DNA
aatctctaatatacatttgt

SEQ ID NO: 35 - DNA, 20 bp, Arachis hypogaea
  source 1..20: mol_type = other DNA
aatatacatttgtcggcctt

SEQ ID NO: 36 - DNA, 20 bp, Arachis hypogaea
  source 1..20: mol_type = other DNA
agcattaataacacaaccta

SEQ ID NO: 37 - DNA, 20 bp, Arachis hypogaea
  source 1..20: mol_type = other DNA
tgttattaatgcttctcata

SEQ ID NO: 38 - DNA, 20 bp, Arachis hypogaea
  source 1..20: mol_type = other DNA
aagctctagctacagagttg

SEQ ID NO: 39 - DNA, 20 bp, Arachis hypogaea
  source 1..20: mol_type = other DNA
gatgatatcaaaaagaaaga

SEQ ID NO: 40 - DNA, 20 bp, Arachis hypogaea
  source 1..20: mol_type = other DNA
aaacgtatgtgatgtttaaa

SEQ ID NO: 41 - DNA, 20 bp, Arachis hypogaea
  source 1..20: mol_type = other DNA
tttaaatggatatgaaattt

SEQ ID NO: 42 - DNA, 20 bp, Arachis hypogaea
  source 1..20: mol_type = other DNA
tgatacgcagatacgctaaa

SEQ ID NO: 43 - DNA, 20 bp, Arachis hypogaea
  source 1..20: mol_type = other DNA
gcacccctaccttacggtat

SEQ ID NO: 44 - DNA, 20 bp, Arachis hypogaea
  source 1..20: mol_type = other DNA
aaaggcaagccaataccgta

SEQ ID NO: 45 - DNA, 20 bp, Arachis hypogaea
  source 1..20: mol_type = other DNA
gcaagccaataccgtaaggt

SEQ ID NO: 46 - DNA, 20 bp, Arachis hypogaea
  source 1..20: mol_type = other DNA
acatatgcacccctacctta

SEQ ID NO: 47 - DNA, 20 bp, Arachis hypogaea
  source 1..20: mol_type = other DNA
caagccaataccgtaaggta

SEQ ID NO: 48 - DNA, 20 bp, Arachis hypogaea
  source 1..20: mol_type = other DNA
aagccaataccgtaaggtag

SEQ ID NO: 49 - DNA, 20 bp, Arachis hypogaea
  source 1..20: mol_type = other DNA
aggtaggggtgcatatgtgc

SEQ ID NO: 50 - DNA, 20 bp, Arachis hypogaea
  source 1..20: mol_type = other DNA
ggtaggggtgcatatgtgcc

SEQ ID NO: 51 - DNA, 20 bp, Arachis hypogaea
  source 1..20: mol_type = other DNA
acatcaaacccgacttcacc

SEQ ID NO: 52 - DNA, 20 bp, Arachis hypogaea
  source 1..20: mol_type = other DNA
gcatatgtgccgggtgaagt

SEQ ID NO: 53 - DNA, 20 bp, Arachis hypogaea
  source 1..20: mol_type = other DNA
catatgtgccgggtgaagtc

SEQ ID NO: 54 - DNA, 20 bp, Arachis hypogaea
  source 1..20: mol_type = other DNA
gtatatttcggatcgggtct

SEQ ID NO: 55 - DNA, 20 bp, Arachis hypogaea
  source 1..20: mol_type = other DNA
tgtatatttcggatcgggtc

SEQ ID NO: 56 - DNA, 20 bp, Arachis hypogaea
  source 1..20: mol_type = other DNA
cccggtgtatatttcggatc

SEQ ID NO: 57 - DNA, 20 bp, Arachis hypogaea
  source 1..20: mol_type = other DNA
acccggtgtatatttcggat

SEQ ID NO: 58 - DNA, 20 bp, Arachis hypogaea
  source 1..20: mol_type = other DNA
aataaacccggtgtatattt

SEQ ID NO: 59 - DNA, 20 bp, Arachis hypogaea
  source 1..20: mol_type = other DNA
acccgatccgaaatatacac

SEQ ID NO: 60 - DNA, 20 bp, Arachis hypogaea
  source 1..20: mol_type = other DNA
cccgatccgaaatatacacc

SEQ ID NO: 61 - DNA, 20 bp, Arachis hypogaea
  source 1..20: mol_type = other DNA
tcgggtctaataaataaacc

SEQ ID NO: 62 - DNA, 20 bp, Arachis hypogaea
  source 1..20: mol_type = other DNA
tcgggtctagggtcgggttc

SEQ ID NO: 63 - DNA, 20 bp, Arachis hypogaea
  source 1..20: mol_type = other DNA
atcgggtctagggtcgggtt

SEQ ID NO: 64 - DNA, 20 bp, Arachis hypogaea
  source 1..20: mol_type = other DNA
gtttcatcgggtctagggtc

SEQ ID NO: 65 - DNA, 20 bp, Arachis hypogaea
  source 1..20: mol_type = other DNA
ggtttcatcgggtctagggt

SEQ ID NO: 66 - DNA, 20 bp, Arachis hypogaea
  source 1..20: mol_type = other DNA
tattggtttcatcgggtcta

SEQ ID NO: 67 - DNA, 20 bp, Arachis hypogaea
  source 1..20: mol_type = other DNA
gtattggtttcatcgggtct

SEQ ID NO: 68 - DNA, 20 bp, Arachis hypogaea
  source 1..20: mol_type = other DNA
gaaagtgtattggtttcatc

SEQ ID NO: 69 - DNA, 20 bp, Arachis hypogaea
  source 1..20: mol_type = other DNA
cgaaagtgtattggtttcat

SEQ ID NO: 70 - DNA, 20 bp, Arachis hypogaea
  source 1..20: mol_type = other DNA
attgtggcccgaaagtgtat

SEQ ID NO: 71 - DNA, 20 bp, Arachis hypogaea
  source 1..20: mol_type = other DNA
cgatgaaaccaatacacttt

SEQ ID NO: 72 - DNA, 20 bp, Arachis hypogaea
  source 1..20: mol_type = other DNA
gatgaaaccaatacactttc

SEQ ID NO: 73 - DNA, 20 bp, Arachis hypogaea
  source 1..20: mol_type = other DNA
gtttttacccggtataattg

SEQ ID NO: 74 - DNA, 20 bp, Arachis hypogaea
  source 1..20: mol_type = other DNA
ctttcgggccacaattatac

SEQ ID NO: 75 - DNA, 20 bp, Arachis hypogaea
  source 1..20: mol_type = other DNA
tttcgggccacaattatacc

SEQ ID NO: 76 - DNA, 20 bp, Arachis hypogaea
  source 1..20: mol_type = other DNA
gttttcacccggtttttacc

SEQ ID NO: 77 - DNA, 20 bp, Arachis hypogaea
  source 1..20: mol_type = other DNA
caattataccgggtaaaaac

SEQ ID NO: 78 - DNA, 20 bp, Arachis hypogaea
  source 1..20: mol_type = other DNA
aattataccgggtaaaaacc

SEQ ID NO: 79 - DNA, 20 bp, Arachis hypogaea
  source 1..20: mol_type = other DNA
ttaatggcccggttttcacc

SEQ ID NO: 80 - DNA, 20 bp, Arachis hypogaea
  source 1..20: mol_type = other DNA
ggtaaaaaccgggtgaaaac

SEQ ID NO: 81 - DNA, 20 bp, Arachis hypogaea
  source 1..20: mol_type = other DNA
gtaaaaaccgggtgaaaacc

SEQ ID NO: 82 - DNA, 20 bp, Arachis hypogaea
  source 1..20: mol_type = other DNA
gtaatgtaatgttaatggcc

SEQ ID NO: 83 - DNA, 20 bp, Arachis hypogaea
  source 1..20: mol_type = other DNA
tcaacgtaatgtaatgttaa

SEQ ID NO: 84 - DNA, 20 bp, Arachis hypogaea
  source 1..20: mol_type = other DNA
ttacatgctagcttacaaga

SEQ ID NO: 85 - DNA, 20 bp, Arachis hypogaea
  source 1..20: mol_type = other DNA
tggttggagtcttgaaaatt

SEQ ID NO: 86 - DNA, 20 bp, Arachis hypogaea
  source 1..20: mol_type = other DNA
ttaccatgttaaataatggt

SEQ ID NO: 87 - DNA, 20 bp, Arachis hypogaea
  source 1..20: mol_type = other DNA
aattttaccatgttaaataa

SEQ ID NO: 88 - DNA, 20 bp, Arachis hypogaea
  source 1..20: mol_type = other DNA
actccaaccattatttaaca

SEQ ID NO: 89 - DNA, 20 bp, Arachis hypogaea
  source 1..20: mol_type = other DNA
ctttaattttaaagaagggt

SEQ ID NO: 90 - DNA, 20 bp, Arachis hypogaea
  source 1..20: mol_type = other DNA
tatgctttaattttaaagaa

SEQ ID NO: 91 - DNA, 20 bp, Arachis hypogaea
  source 1..20: mol_type = other DNA
ttatgctttaattttaaaga

SEQ ID NO: 92 - DNA, 20 bp, Arachis hypogaea
  source 1..20: mol_type = other DNA
ttttgctttagtatggattg

SEQ ID NO: 93 - DNA, 20 bp, Arachis hypogaea
  source 1..20: mol_type = other DNA
attgtggttttgctttagta

SEQ ID NO: 94 - DNA, 20 bp, Arachis hypogaea
  source 1..20: mol_type = other DNA
gacaatattagtattgattg

SEQ ID NO: 95 - DNA, 20 bp, Arachis hypogaea
  source 1..20: mol_type = other DNA
tttgtattgatttaaatatt

SEQ ID NO: 96 - DNA, 20 bp, Arachis hypogaea
  source 1..20: mol_type = other DNA
ggatcatgactattcttatg

SEQ ID NO: 97 - DNA, 20 bp, Arachis hypogaea
  source 1..20: mol_type = other DNA
atattttgtgttattagtga

SEQ ID NO: 98 - DNA, 20 bp, Arachis hypogaea
  source 1..20: mol_type = other DNA
tattaattgtgtatgatgac

SEQ ID NO: 99 - DNA, 20 bp, Arachis hypogaea
  source 1..20: mol_type = other DNA
attaattgtgtatgatgacc

SEQ ID NO: 100 - DNA, 20 bp, Arachis hypogaea
  source 1..20: mol_type = other DNA
ccgaagtcggcctggtggcc

SEQ ID NO: 101 - DNA, 20 bp, Arachis hypogaea
  source 1..20: mol_type = other DNA
tgtatgatgaccgggccacc

SEQ ID NO: 102 - DNA, 20 bp, Arachis hypogaea
  source 1..20: mol_type = other DNA
gtcacccgaagtcggcctgg

SEQ ID NO: 103 - DNA, 20 bp, Arachis hypogaea
  source 1..20: mol_type = other DNA
cgggtcacccgaagtcggcc

SEQ ID NO: 104 - DNA, 20 bp, Arachis hypogaea
  source 1..20: mol_type = other DNA
ccgggccaccaggccgactt

SEQ ID NO: 105 - DNA, 20 bp, Arachis hypogaea
  source 1..20: mol_type = other DNA
cgggccaccaggccgacttc

SEQ ID NO: 106 - DNA, 20 bp, Arachis hypogaea
  source 1..20: mol_type = other DNA
tagctcgggtcacccgaagt

SEQ ID NO: 107 - DNA, 20 bp, Arachis hypogaea
  source 1..20: mol_type = other DNA
acttcgggtgacccgagcta

SEQ ID NO: 108 - DNA, 20 bp, Arachis hypogaea
  source 1..20: mol_type = other DNA
tcgggtccgggccatagctc

SEQ ID NO: 109 - DNA, 20 bp, Arachis hypogaea
  source 1..20: mol_type = other DNA
gtcgggtccgggccatagct

SEQ ID NO: 110 - DNA, 20 bp, Arachis hypogaea
  source 1..20: mol_type = other DNA
gggtgacccgagctatggcc

SEQ ID NO: 111 - DNA, 20 bp, Arachis hypogaea
  source 1..20: mol_type = other DNA
cattatttcgggtcgggtcc

SEQ ID NO: 112 - DNA, 20 bp, Arachis hypogaea
  source 1..20: mol_type = other DNA
tcattatttcgggtcgggtc

SEQ ID NO: 113 - DNA, 20 bp, Arachis hypogaea
  source 1..20: mol_type = other DNA
cccggtcattatttcgggtc

SEQ ID NO: 114 - DNA, 20 bp, Arachis hypogaea
  source 1..20: mol_type = other DNA
acccggtcattatttcgggt

SEQ ID NO: 115 - DNA, 20 bp, Arachis hypogaea
  source 1..20: mol_type = other DNA
atagacccggtcattatttc

SEQ ID NO: 116 - DNA, 20 bp, Arachis hypogaea
  source 1..20: mol_type = other DNA
aatagacccggtcattattt

SEQ ID NO: 117 - DNA, 20 bp, Arachis hypogaea
  source 1..20: mol_type = other DNA
acccgacccgaaataatgac

SEQ ID NO: 118 - DNA, 20 bp, Arachis hypogaea
  source 1..20: mol_type = other DNA
cccgacccgaaataatgacc

SEQ ID NO: 119 - DNA, 20 bp, Arachis hypogaea
  source 1..20: mol_type = other DNA
aagggtctcaaaaatagacc

SEQ ID NO: 120 - DNA, 20 bp, Arachis hypogaea
  source 1..20: mol_type = other DNA
tcgggtttagggtcgggtaa

SEQ ID NO: 121 - DNA, 20 bp, Arachis hypogaea
  source 1..20: mol_type = other DNA
atcgggtttagggtcgggta

SEQ ID NO: 122 - DNA, 20 bp, Arachis hypogaea
  source 1..20: mol_type = other DNA
atttcatcgggtttagggtc

SEQ ID NO: 123 - DNA, 20 bp, Arachis hypogaea
  source 1..20: mol_type = other DNA
gatttcatcgggtttagggt

SEQ ID NO: 124 - DNA, 20 bp, Arachis hypogaea
  source 1..20: mol_type = other DNA
gtatgatttcatcgggttta

SEQ ID NO: 125 - DNA, 20 bp, Arachis hypogaea
  source 1..20: mol_type = other DNA
ggtatgatttcatcgggttt

SEQ ID NO: 126 - DNA, 20 bp, Arachis hypogaea
  source 1..20: mol_type = other DNA
taatttggtatgatttcatc

SEQ ID NO: 127 - DNA, 20 bp, Arachis hypogaea
  source 1..20: mol_type = other DNA
ctaatttggtatgatttcat

SEQ ID NO: 128 - DNA, 20 bp, Arachis hypogaea
  source 1..20: mol_type = other DNA
gaacattttaggggctaatt

SEQ ID NO: 129 - DNA, 20 bp, Arachis hypogaea
  source 1..20: mol_type = other DNA
cccggtcccgaacattttag

SEQ ID NO: 130 - DNA, 20 bp, Arachis hypogaea
  source 1..20: mol_type = other DNA
gcccggtcccgaacatttta

SEQ ID NO: 131 - DNA, 20 bp, Arachis hypogaea
  source 1..20: mol_type = other DNA
ggcccggtcccgaacatttt

SEQ ID NO: 132 - DNA, 20 bp, Arachis hypogaea
  source 1..20: mol_type = other DNA
aaattagcccctaaaatgtt

SEQ ID NO: 133 - DNA, 20 bp, Arachis hypogaea
  source 1..20: mol_type = other DNA
aattagcccctaaaatgttc

SEQ ID NO: 134 - DNA, 20 bp, Arachis hypogaea
  source 1..20: mol_type = other DNA
gcccctaaaatgttcgggac

SEQ ID NO: 135 - DNA, 20 bp, Arachis hypogaea
  source 1..20: mol_type = other DNA
cccctaaaatgttcgggacc

SEQ ID NO: 136 - DNA, 20 bp, Arachis hypogaea
  source 1..20: mol_type = other DNA
taaaatgttcgggaccgggc

SEQ ID NO: 137 - DNA, 20 bp, Arachis hypogaea
  source 1..20: mol_type = other DNA
aaaatgttcgggaccgggcc

SEQ ID NO: 138 - DNA, 20 bp, Arachis hypogaea
  source 1..20: mol_type = other DNA
cccggcccgaaggcccggcc

SEQ ID NO: 139 - DNA, 20 bp, Arachis hypogaea
  source 1..20: mol_type = other DNA
tcgggaccgggccgggcctt

SEQ ID NO: 140 - DNA, 20 bp, Arachis hypogaea
  source 1..20: mol_type = other DNA
cccggcccggcccgaaggcc

SEQ ID NO: 141 - DNA, 20 bp, Arachis hypogaea
  source 1..20: mol_type = other DNA
cgggaccgggccgggccttc

SEQ ID NO: 142 - DNA, 20 bp, Arachis hypogaea
  source 1..20: mol_type = other DNA
accgggccgggccttcgggc

SEQ ID NO: 143 - DNA, 20 bp, Arachis hypogaea
  source 1..20: mol_type = other DNA
acagacccggcccggcccga

SEQ ID NO: 144 - DNA, 20 bp, Arachis hypogaea
  source 1..20: mol_type = other DNA
ccgggccgggccttcgggcc

SEQ ID NO: 145 - DNA, 20 bp, Arachis hypogaea
  source 1..20: mol_type = other DNA
gccgggccttcgggccgggc

SEQ ID NO: 146 - DNA, 20 bp, Arachis hypogaea
  source 1..20: mol_type = other DNA
ccgggccttcgggccgggcc

SEQ ID NO: 147 - DNA, 20 bp, Arachis hypogaea
  source 1..20: mol_type = other DNA
aggggtgcacagacccggcc

SEQ ID NO: 148 - DNA, 20 bp, Arachis hypogaea
  source 1..20: mol_type = other DNA
acggtaggggtgcacagacc

SEQ ID NO: 149 - DNA, 20 bp, Arachis hypogaea
  source 1..20: mol_type = other DNA
ttcagctatccttacggtag

SEQ ID NO: 150 - DNA, 20 bp, Arachis hypogaea
  source 1..20: mol_type = other DNA
attcagctatccttacggta

SEQ ID NO: 151 - DNA, 20 bp, Arachis hypogaea
  source 1..20: mol_type = other DNA
gtctgtgcacccctaccgta

SEQ ID NO: 152 - DNA, 20 bp, Arachis hypogaea
  source 1..20: mol_type = other DNA
cattcagctatccttacggt

SEQ ID NO: 153 - DNA, 20 bp, Arachis hypogaea
  source 1..20: mol_type = other DNA
cacccattcagctatcctta

SEQ ID NO: 154 - DNA, 20 bp, Arachis hypogaea
  source 1..20: mol_type = other DNA
ctaccgtaaggatagctgaa

SEQ ID NO: 155 - DNA, 20 bp, Arachis hypogaea
  source 1..20: mol_type = other DNA
taccgtaaggatagctgaat

SEQ ID NO: 156 - DNA, 20 bp, Arachis hypogaea
  source 1..20: mol_type = other DNA
atattttatcaaaagacaaa

SEQ ID NO: 157 - DNA, 20 bp, Arachis hypogaea
  source 1..20: mol_type = other DNA
gttccactgcacatacagga

SEQ ID NO: 158 - DNA, 20 bp, Arachis hypogaea
  source 1..20: mol_type = other DNA
aaaggttccactgcacatac

SEQ ID NO: 159 - DNA, 20 bp, Arachis hypogaea
  source 1..20: mol_type = other DNA
aatccatcctgtatgtgcag

SEQ ID NO: 160 - DNA, 20 bp, Arachis hypogaea
  source 1..20: mol_type = other DNA
tcactccattgtctgggaaa

SEQ ID NO: 161 - DNA, 20 bp, Arachis hypogaea
  source 1..20: mol_type = other DNA
tggaaccttttcccagacaa

SEQ ID NO: 162 - DNA, 20 bp, Arachis hypogaea
  source 1..20: mol_type = other DNA
tgttcatcactccattgtct

SEQ ID NO: 163 - DNA, 20 bp, Arachis hypogaea
  source 1..20: mol_type = other DNA
atgttcatcactccattgtc

SEQ ID NO: 164 - DNA, 20 bp, Arachis hypogaea
  source 1..20: mol_type = other DNA
gatatgtatggtgatggacg

SEQ ID NO: 165 - DNA, 20 bp, Arachis hypogaea
  source 1..20: mol_type = other DNA
gctttggatatgtatggtga

SEQ ID NO: 166 - DNA, 20 bp, Arachis hypogaea
  source 1..20: mol_type = other DNA
ttttttgctttggatatgta

SEQ ID NO: 167 - DNA, 20 bp, Arachis hypogaea
  source 1..20: mol_type = other DNA
atttgttaaattttttgctt

SEQ ID NO: 168 - DNA, 20 bp, Arachis hypogaea
  source 1..20: mol_type = other DNA
gttaatatgcatggcaattg

SEQ ID NO: 169 - DNA, 20 bp, Arachis hypogaea
  source 1..20: mol_type = other DNA
tgttaatatgcatggcaatt

SEQ ID NO: 170 - DNA, 20 bp, Arachis hypogaea
  source 1..20: mol_type = other DNA
gtgttaatatgcatggcaat

SEQ ID NO: 171 - DNA, 20 bp, Arachis hypogaea
  source 1..20: mol_type = other DNA
agtgtacgtgttaatatgca

SEQ ID NO: 172 - DNA, 20 bp, Arachis hypogaea
  source 1..20: mol_type = other DNA
ggatggattgtggtgcatgg

SEQ ID NO: 173 - DNA, 20 bp, Arachis hypogaea
  source 1..20: mol_type = other DNA
gatggatggattgtggtgca

SEQ ID NO: 174 - DNA, 20 bp, Arachis hypogaea
  source 1..20: mol_type = other DNA
aacaagagatggatggattg

SEQ ID NO: 175 - DNA, 20 bp, Arachis hypogaea
  source 1..20: mol_type = other DNA
agagataaacaagagatgga

SEQ ID NO: 176 - DNA, 20 bp, Arachis hypogaea
  source 1..20: mol_type = other DNA
gcttagagataaacaagaga

SEQ ID NO: 177 - DNA, 20 bp, Arachis hypogaea
  source 1..20: mol_type = other DNA
gtggcaacaacactaggtct

SEQ ID NO: 178 - DNA, 20 bp, Arachis hypogaea
  source 1..20: mol_type = other DNA
tgtgaggtggcaacaacact

SEQ ID NO: 179 - DNA, 20 bp, Arachis hypogaea
  source 1..20: mol_type = other DNA
tgaaattgagaaatgtgagg

SEQ ID NO: 180 - DNA, 20 bp, Arachis hypogaea
  source 1..20: mol_type = other DNA
tgttgaaattgagaaatgtg

SEQ ID NO: 181 - DNA, 20 bp, Arachis hypogaea
  source 1..20: mol_type = other DNA
tgggcattggagtggcatgc

SEQ ID NO: 182 - DNA, 20 bp, Arachis hypogaea
  source 1..20: mol_type = other DNA
tgtacacttgggcattggag

SEQ ID NO: 183 - DNA, 20 bp, Arachis hypogaea
  source 1..20: mol_type = other DNA
atggatgtacacttgggcat

SEQ ID NO: 184 - DNA, 20 bp, Arachis hypogaea
  source 1..20: mol_type = other DNA
gatgatatggatgtacactt

SEQ ID NO: 185 - DNA, 20 bp, Arachis hypogaea
  source 1..20: mol_type = other DNA
ggatgatatggatgtacact

SEQ ID NO: 186 - DNA, 20 bp, Arachis hypogaea
  source 1..20: mol_type = other DNA
atagttgcgttaggatgata

SEQ ID NO: 187 - DNA, 20 bp, Arachis hypogaea
  source 1..20: mol_type = other DNA
ggtatttatatagttgcgtt

SEQ ID NO: 188 - DNA, 20 bp, Arachis hypogaea
  source 1..20: mol_type = other DNA
aaatgatggagggaggtgag

SEQ ID NO: 189 - DNA, 20 bp, Arachis hypogaea
  source 1..20: mol_type = other DNA
gatggtgaaatgatggaggg

SEQ ID NO: 190 - DNA, 20 bp, Arachis hypogaea
  source 1..20: mol_type = other DNA
gtggatggtgaaatgatgga

SEQ ID NO: 191 - DNA, 20 bp, Arachis hypogaea
  source 1..20: mol_type = other DNA
tgtggatggtgaaatgatgg

SEQ ID NO: 192 - DNA, 20 bp, Arachis hypogaea
  source 1..20: mol_type = other DNA
gagtgtggatggtgaaatga

SEQ ID NO: 193 - DNA, 20 bp, Arachis hypogaea
  source 1..20: mol_type = other DNA
atgattattatgagtgtgga

SEQ ID NO: 194 - DNA, 20 bp, Arachis hypogaea
  source 1..20: mol_type = other DNA
atatatgattattatgagtg

SEQ ID NO: 195 - DNA, 20 bp, Arachis hypogaea
  source 1..20: mol_type = other DNA
tcatctatataagtagtagc

SEQ ID NO: 196 - DNA, 20 bp, Arachis hypogaea
  source 1..20: mol_type = other DNA
gtagtagcaggagcaatgag

SEQ ID NO: 197 - DNA, 20 bp, Arachis hypogaea
  source 1..20: mol_type = other DNA
tagtagcaggagcaatgaga

SEQ ID NO: 198 - DNA, 20 bp, Arachis hypogaea
  source 1..20: mol_type = other DNA
tagcaggagcaatgagaggg

SEQ ID NO: 199 - DNA, 20 bp, Arachis hypogaea
  source 1..20: mol_type = other DNA
agcaggagcaatgagaggga

SEQ ID NO: 200 - DNA, 20 bp, Arachis hypogaea
  source 1..20: mol_type = other DNA
atccctagcaacagcatcag

SEQ ID NO: 201 - DNA, 20 bp, Arachis hypogaea
  source 1..20: mol_type = other DNA
tctccactgatgctgttgct

SEQ ID NO: 202 - DNA, 20 bp, Arachis hypogaea
  source 1..20: mol_type = other DNA
ctccactgatgctgttgcta

SEQ ID NO: 203 - DNA, 20 bp, Arachis hypogaea
  source 1..20: mol_type = other DNA
gttgctagggatccttgtcc

SEQ ID NO: 204 - DNA, 20 bp, Arachis hypogaea
  source 1..20: mol_type = other DNA
cagaaactgaagccaggaca

SEQ ID NO: 205 - DNA, 20 bp, Arachis hypogaea
  source 1..20: mol_type = other DNA
gcgttgcagaaactgaagcc

SEQ ID NO: 206 - DNA, 20 bp, Arachis hypogaea
  source 1..20: mol_type = other DNA
cttctggtaaggtgatgact

SEQ ID NO: 207 - DNA, 20 bp, Arachis hypogaea
  source 1..20: mol_type = other DNA
ttctctgttttcttctggta

SEQ ID NO: 208 - DNA, 20 bp, Arachis hypogaea
  source 1..20: mol_type = other DNA
aggggttctctgttttcttc

SEQ ID NO: 209 - DNA, 20 bp, Arachis hypogaea
  source 1..20: mol_type = other DNA
ggaggcacctctgggcgcag

SEQ ID NO: 210 - DNA, 20 bp, Arachis hypogaea
  source 1..20: mol_type = other DNA
tggaggcacctctgggcgca

SEQ ID NO: 211 - DNA, 20 bp, Arachis hypogaea
  source 1..20: mol_type = other DNA
ctggaggcacctctgggcgc

SEQ ID NO: 212 - DNA, 20 bp, Arachis hypogaea
  source 1..20: mol_type = other DNA
cagagaacccctgcgcccag

SEQ ID NO: 213 - DNA, 20 bp, Arachis hypogaea
  source 1..20: mol_type = other DNA
acaactctggaggcacctct

SEQ ID NO: 214 - DNA, 20 bp, Arachis hypogaea
  source 1..20: mol_type = other DNA
gacaactctggaggcacctc

SEQ ID NO: 215 - DNA, 20 bp, Arachis hypogaea
  source 1..20: mol_type = other DNA
gttcctgttgacaactctgg

SEQ ID NO: 216 - DNA, 20 bp, Arachis hypogaea
  source 1..20: mol_type = other DNA
ccggttcctgttgacaactc

SEQ ID NO: 217 - DNA, 20 bp, Arachis hypogaea
  source 1..20: mol_type = other DNA
gtgcctccagagttgtcaac

SEQ ID NO: 218 - DNA, 20 bp, Arachis hypogaea
  source 1..20: mol_type = other DNA
ccagagttgtcaacaggaac

SEQ ID NO: 219 - DNA, 20 bp, Arachis hypogaea
  source 1..20: mol_type = other DNA
gccttttgcttcaagtcatc

SEQ ID NO: 220 - DNA, 20 bp, Arachis hypogaea
  source 1..20: mol_type = other DNA
accggatgacttgaagcaaa

SEQ ID NO: 221 - DNA, 20 bp, Arachis hypogaea
  source 1..20: mol_type = other DNA
acgaggatcatactcgagct

SEQ ID NO: 222 - DNA, 20 bp, Arachis hypogaea
  source 1..20: mol_type = other DNA
cgaggatcatagacacaacg

SEQ ID NO: 223 - DNA, 20 bp, Arachis hypogaea
  source 1..20: mol_type = other DNA
cgttgtgtctatgatcctcg

SEQ ID NO: 224 - DNA, 20 bp, Arachis hypogaea
  source 1..20: mol_type = other DNA
gtggtgccagtgtgtcctcg

SEQ ID NO: 225 - DNA, 20 bp, Arachis hypogaea
  source 1..20: mol_type = other DNA
tatgatcctcgaggacacac

SEQ ID NO: 226 - DNA, 20 bp, Arachis hypogaea
  source 1..20: mol_type = other DNA
tggaggggaacgttggttgg

SEQ ID NO: 227 - DNA, 20 bp, Arachis hypogaea
  source 1..20: mol_type = other DNA
ccctggaggggaacgttggt

SEQ ID NO: 228 - DNA, 20 bp, Arachis hypogaea
  source 1..20: mol_type = other DNA
gctcccctggaggggaacgt

SEQ ID NO: 229 - DNA, 20 bp, Arachis hypogaea
  source 1..20: mol_type = other DNA
accaaccaacgttcccctcc

SEQ ID NO: 230 - DNA, 20 bp, Arachis hypogaea
  source 1..20: mol_type = other DNA
ccaaccaacgttcccctcca

SEQ ID NO: 231 - DNA, 20 bp, Arachis hypogaea
  source 1..20: mol_type = other DNA
caaccaacgttcccctccag

SEQ ID NO: 232 - DNA, 20 bp, Arachis hypogaea
  source 1..20: mol_type = other DNA
acgtgtccgctcccctggag

SEQ ID NO: 233 - DNA, 20 bp, Arachis hypogaea
  source 1..20: mol_type = other DNA
cacgtgtccgctcccctgga

SEQ ID NO: 234 - DNA, 20 bp, Arachis hypogaea
  source 1..20: mol_type = other DNA
ccacgtgtccgctcccctgg

SEQ ID NO: 235 - DNA, 20 bp, Arachis hypogaea
  source 1..20: mol_type = other DNA
aacgttcccctccaggggag

SEQ ID NO: 236 - DNA, 20 bp, Arachis hypogaea
  source 1..20: mol_type = other DNA
cggccacgtgtccgctcccc

SEQ ID NO: 237 - DNA, 20 bp, Arachis hypogaea
  source 1..20: mol_type = other DNA
cctccaggggagcggacacg

SEQ ID NO: 238 - DNA, 20 bp, Arachis hypogaea
  source 1..20: mol_type = other DNA
cggacacgtggccgccaacc

SEQ ID NO: 239 - DNA, 20 bp, Arachis hypogaea
  source 1..20: mol_type = other DNA
catcgtagtctccgggttgg

SEQ ID NO: 240 - DNA, 20 bp, Arachis hypogaea
  source 1..20: mol_type = other DNA
catcatcgtagtctccgggt

SEQ ID NO: 241 - DNA, 20 bp, Arachis hypogaea
  source 1..20: mol_type = other DNA
cggtcatcatcgtagtctcc

SEQ ID NO: 242 - DNA, 20 bp, Arachis hypogaea
  source 1..20: mol_type = other DNA
gcggtcatcatcgtagtctc

SEQ ID NO: 243 - DNA, 20 bp, Arachis hypogaea
  source 1..20: mol_type = other DNA
cctctcttcggggttgacgg

SEQ ID NO: 244 - DNA, 20 bp, Arachis hypogaea
  source 1..20: mol_type = other DNA
cttcctctcttcggggttga

SEQ ID NO: 245 - DNA, 20 bp, Arachis hypogaea
  source 1..20: mol_type = other DNA
cggcctccttcctctcttcg

SEQ ID NO: 246 - DNA, 20 bp, Arachis hypogaea
  source 1..20: mol_type = other DNA
ccgccgtcaaccccgaagag

SEQ ID NO: 247 - DNA, 20 bp, Arachis hypogaea
  source 1..20: mol_type = other DNA
tcggcctccttcctctcttc

SEQ ID NO: 248 - DNA, 20 bp, Arachis hypogaea
  source 1..20: mol_type = other DNA
atcggcctccttcctctctt

SEQ ID NO: 249 - DNA, 20 bp, Arachis hypogaea
  source 1..20: mol_type = other DNA
cgtcaaccccgaagagagga

SEQ ID NO: 250 - DNA, 20 bp, Arachis hypogaea
  source 1..20: mol_type = other DNA
caaccccgaagagaggaagg

SEQ ID NO: 251 - DNA, 20 bp, Arachis hypogaea
  source 1..20: mol_type = other DNA
gaagagaggaaggaggccga

SEQ ID NO: 252 - DNA, 20 bp, Arachis hypogaea
  source 1..20: mol_type = other DNA
aagagaggaaggaggccgat

SEQ ID NO: 253 - DNA, 20 bp, Arachis hypogaea
  source 1..20: mol_type = other DNA
agagaggaaggaggccgatg

SEQ ID NO: 254 - DNA, 20 bp, Arachis hypogaea
  source 1..20: mol_type = other DNA
tcggtccagctggtccccat

SEQ ID NO: 255 - DNA, 20 bp, Arachis hypogaea
  source 1..20: mol_type = other DNA
ggaggccgatggggaccagc

SEQ ID NO: 256 - DNA, 20 bp, Arachis hypogaea
  source 1..20: mol_type = other DNA
tcacgctccctcggtccagc

SEQ ID NO: 257 - DNA, 20 bp, Arachis hypogaea
  source 1..20: mol_type = other DNA
gatggggaccagctggaccg

SEQ ID NO: 258 - DNA, 20 bp, Arachis hypogaea
  source 1..20: mol_type = other DNA
atggggaccagctggaccga

SEQ ID NO: 259 - DNA, 20 bp, Arachis hypogaea
  source 1..20: mol_type = other DNA
tcttctctttcacgctccct

SEQ ID NO: 260 - DNA, 20 bp, Arachis hypogaea
  source 1..20: mol_type = other DNA
agcgtgaaagagaagaagac

SEQ ID NO: 261 - DNA, 20 bp, Arachis hypogaea
  source 1..20: mol_type = other DNA
ggtcgcctccaatcttctct

SEQ ID NO: 262 - DNA, 20 bp, Arachis hypogaea
  source 1..20: mol_type = other DNA
ggagacaaccaagagaagat

SEQ ID NO: 263 - DNA, 20 bp, Arachis hypogaea
  source 1..20: mol_type = other DNA
gacaaccaagagaagattgg

SEQ ID NO: 264 - DNA, 20 bp, Arachis hypogaea
  source 1..20: mol_type = other DNA
ttccgtggctgctgatgact

SEQ ID NO: 265 - DNA, 20 bp, Arachis hypogaea
  source 1..20: mol_type = other DNA
gaccaagtcatcagcagcca

SEQ ID NO: 266 - DNA, 20 bp, Arachis hypogaea
  source 1..20: mol_type = other DNA
ccttcgggccttattttccg

SEQ ID NO: 267 - DNA, 20 bp, Arachis hypogaea
  source 1..20: mol_type = other DNA
atcagcagccacggaaaata

SEQ ID NO: 268 - DNA, 20 bp, Arachis hypogaea
  source 1..20: mol_type = other DNA
ccacggaaaataaggcccga

SEQ ID NO: 269 - DNA, 20 bp, Arachis hypogaea
  source 1..20: mol_type = other DNA
tgttctccttctcttccttc

SEQ ID NO: 270 - DNA, 20 bp, Arachis hypogaea
  source 1..20: mol_type = other DNA
ttgttctccttctcttcctt

SEQ ID NO: 271 - DNA, 20 bp, Arachis hypogaea
  source 1..20: mol_type = other DNA
ataaggcccgaaggaagaga

SEQ ID NO: 272 - DNA, 20 bp, Arachis hypogaea
  source 1..20: mol_type = other DNA
gaagagaaggagaacaagag

SEQ ID NO: 273 - DNA, 20 bp, Arachis hypogaea
  source 1..20: mol_type = other DNA
aagagaaggagaacaagagt

SEQ ID NO: 274 - DNA, 20 bp, Arachis hypogaea
  source 1..20: mol_type = other DNA
agagaaggagaacaagagtg

SEQ ID NO: 275 - DNA, 20 bp, Arachis hypogaea
  source 1..20: mol_type = other DNA
gaacaagagtggggaacacc

SEQ ID NO: 276 - DNA, 20 bp, Arachis hypogaea
  source 1..20: mol_type = other DNA
tcttccctcacatggctacc

SEQ ID NO: 277 - DNA, 20 bp, Arachis hypogaea
  source 1..20: mol_type = other DNA
gaacaccaggtagccatgtg

SEQ ID NO: 278 - DNA, 20 bp, Arachis hypogaea
  source 1..20: mol_type = other DNA
aacaccaggtagccatgtga

SEQ ID NO: 279 - DNA, 20 bp, Arachis hypogaea
  source 1..20: mol_type = other DNA
gagatgtttcttccctcaca

SEQ ID NO: 280 - DNA, 20 bp, Arachis hypogaea
  source 1..20: mol_type = other DNA
atgtgagggaagaaacatct

SEQ ID NO: 281 - DNA, 20 bp, Arachis hypogaea
  source 1..20: mol_type = other DNA
gccttgacgggaagtagaaa

SEQ ID NO: 282 - DNA, 20 bp, Arachis hypogaea
  source 1..20: mol_type = other DNA
cgccttgacgggaagtagaa

SEQ ID NO: 283 - DNA, 20 bp, Arachis hypogaea
  source 1..20: mol_type = other DNA
accctttctacttcccgtca

SEQ ID NO: 284 - DNA, 20 bp, Arachis hypogaea
  source 1..20: mol_type = other DNA
gggtgctaaaccgccttgac

SEQ ID NO: 285 - DNA, 20 bp, Arachis hypogaea
  source 1..20: mol_type = other DNA
ctttctacttcccgtcaagg

SEQ ID NO: 286 - DNA, 20 bp, Arachis hypogaea
  source 1..20: mol_type = other DNA
cgggtgctaaaccgccttga

SEQ ID NO: 287 - DNA, 20 bp, Arachis hypogaea
  source 1..20: mol_type = other DNA
aggcggtttagcacccgcta

SEQ ID NO: 288 - DNA, 20 bp, Arachis hypogaea
  source 1..20: mol_type = other DNA
ggcggtttagcacccgctac

SEQ ID NO: 289 - DNA, 20 bp, Arachis hypogaea
  source 1..20: mol_type = other DNA
accgttttggttcccgtagc

SEQ ID NO: 290 - DNA, 20 bp, Arachis hypogaea
  source 1..20: mol_type = other DNA
taccgttttggttcccgtag

SEQ ID NO: 291 - DNA, 20 bp, Arachis hypogaea
  source 1..20: mol_type = other DNA
acccgctacgggaaccaaaa

SEQ ID NO: 292 - DNA, 20 bp, Arachis hypogaea
  source 1..20: mol_type = other DNA
ggacccggatcctaccgttt

SEQ ID NO: 293 - DNA, 20 bp, Arachis hypogaea
  source 1..20: mol_type = other DNA
gctacgggaaccaaaacggt

SEQ ID NO: 294 - DNA, 20 bp, Arachis hypogaea
  source 1..20: mol_type = other DNA
ggaaccaaaacggtaggatc

SEQ ID NO: 295 - DNA, 20 bp, Arachis hypogaea
  source 1..20: mol_type = other DNA
gaaccaaaacggtaggatcc

SEQ ID NO: 296 - DNA, 20 bp, Arachis hypogaea
  source 1..20: mol_type = other DNA
ggtcaaacctctgcaggacc

SEQ ID NO: 297 - DNA, 20 bp, Arachis hypogaea
  source 1..20: mol_type = other DNA
gtaggatccgggtcctgcag

SEQ ID NO: 298 - DNA, 20 bp, Arachis hypogaea
  source 1..20: mol_type = other DNA
acctttggtcaaacctctgc

SEQ ID NO: 299 - DNA, 20 bp, Arachis hypogaea
  source 1..20: mol_type = other DNA
tcctgcagaggtttgaccaa

SEQ ID NO: 300 - DNA, 20 bp, Arachis hypogaea
  source 1..20: mol_type = other DNA
tctgaaactgccttgacctt

SEQ ID NO: 301 - DNA, 20 bp, Arachis hypogaea
  source 1..20: mol_type = other DNA
agaggtttgaccaaaggtca

SEQ ID NO: 302 - DNA, 20 bp, Arachis hypogaea
  source 1..20: mol_type = other DNA
tctgcacaatacggtgattc

SEQ ID NO: 303 - DNA, 20 bp, Arachis hypogaea
  source 1..20: mol_type = other DNA
tggcctcgatctgcacaata

SEQ ID NO: 304 - DNA, 20 bp, Arachis hypogaea
  source 1..20: mol_type = other DNA
tcaccgtattgtgcagatcg

SEQ ID NO: 305 - DNA, 20 bp, Arachis hypogaea
  source 1..20: mol_type = other DNA
aagaacaagagtgttaggtt

SEQ ID NO: 306 - DNA, 20 bp, Arachis hypogaea
  source 1..20: mol_type = other DNA
ttgggaagaacaagagtgtt

SEQ ID NO: 307 - DNA, 20 bp, Arachis hypogaea
  source 1..20: mol_type = other DNA
ttatcagcatcagcgtgctt

SEQ ID NO: 308 - DNA, 20 bp, Arachis hypogaea
  source 1..20: mol_type = other DNA
gttatcagcatcagcgtgct

SEQ ID NO: 309 - DNA, 20 bp, Arachis hypogaea
  source 1..20: mol_type = other DNA
tgataccttgctggataaca

SEQ ID NO: 310 - DNA, 20 bp, Arachis hypogaea
  source 1..20: mol_type = other DNA
aacatccttgttatccagca

SEQ ID NO: 311 - DNA, 20 bp, Arachis hypogaea
  source 1..20: mol_type = other DNA
aattagatttgataccttgc

SEQ ID NO: 312 - DNA, 20 bp, Arachis hypogaea
  source 1..20: mol_type = other DNA
gcttgatacatatgattcat

SEQ ID NO: 313 - DNA, 20 bp, Arachis hypogaea
  source 1..20: mol_type = other DNA
catatgattcattggattgc

SEQ ID NO: 314 - DNA, 20 bp, Arachis hypogaea
  source 1..20: mol_type = other DNA
atatgattcattggattgca

SEQ ID NO: 315 - DNA, 20 bp, Arachis hypogaea
  source 1..20: mol_type = other DNA
gccatttgctacggtcacgg

SEQ ID NO: 316 - DNA, 20 bp, Arachis hypogaea
  source 1..20: mol_type = other DNA
attgccatttgctacggtca

SEQ ID NO: 317 - DNA, 20 bp, Arachis hypogaea
  source 1..20: mol_type = other DNA
tctgttattgccatttgcta

SEQ ID NO: 318 - DNA, 20 bp, Arachis hypogaea
  source 1..20: mol_type = other DNA
gccaccgtgaccgtagcaaa

SEQ ID NO: 319 - DNA, 20 bp, Arachis hypogaea
  source 1..20: mol_type = other DNA
aaagagctttaatcttgacg

SEQ ID NO: 320 - DNA, 20 bp, Arachis hypogaea
  source 1..20: mol_type = other DNA
aagagctttaatcttgacga

SEQ ID NO: 321 - DNA, 20 bp, Arachis hypogaea
  source 1..20: mol_type = other DNA
cggatgggattctgagtgca

SEQ ID NO: 322 - DNA, 20 bp, Arachis hypogaea
  source 1..20: mol_type = other DNA
catgcactcagaatcccatc

SEQ ID NO: 323 - DNA, 20 bp, Arachis hypogaea
  source 1..20: mol_type = other DNA
tgtaggaaatgaaaccggat

SEQ ID NO: 324 - DNA, 20 bp, Arachis hypogaea
  source 1..20: mol_type = other DNA
atgtaggaaatgaaaccgga

SEQ ID NO: 325 - DNA, 20 bp, Arachis hypogaea
  source 1..20: mol_type = other DNA
caagatgtaggaaatgaaac

SEQ ID NO: 326 - DNA, 20 bp, Arachis hypogaea
  source 1..20: mol_type = other DNA
gtcatggcggttcaagatgt

SEQ ID NO: 327 - DNA, 20 bp, Arachis hypogaea
  source 1..20: mol_type = other DNA
tgaggttctggttgtcatgg

SEQ ID NO: 328 - DNA, 20 bp, Arachis hypogaea
  source 1..20: mol_type = other DNA
ctctgaggttctggttgtca

SEQ ID NO: 329 - DNA, 20 bp, Arachis hypogaea
  source 1..20: mol_type = other DNA
ttttagctactctgaggttc

SEQ ID NO: 330 - DNA, 20 bp, Arachis hypogaea
  source 1..20: mol_type = other DNA
tggagattttagctactctg

SEQ ID NO: 331 - DNA, 20 bp, Arachis hypogaea
  source 1..20: mol_type = other DNA
gccgggtgtgttaacgggca

SEQ ID NO: 332 - DNA, 20 bp, Arachis hypogaea
  source 1..20: mol_type = other DNA
aactggccgggtgtgttaac

SEQ ID NO: 333 - DNA, 20 bp, Arachis hypogaea
  source 1..20: mol_type = other DNA
aaactggccgggtgtgttaa

SEQ ID NO: 334 - DNA, 20 bp, Arachis hypogaea
  source 1..20: mol_type = other DNA
tccatgcccgttaacacacc

SEQ ID NO: 335 - DNA, 20 bp, Arachis hypogaea
  source 1..20: mol_type = other DNA
agaggtacctcaaactggcc

SEQ ID NO: 336 - DNA, 20 bp, Arachis hypogaea
  source 1..20: mol_type = other DNA
aagaggtacctcaaactggc

SEQ ID NO: 337 - DNA, 20 bp, Arachis hypogaea
  source 1..20: mol_type = other DNA
taacacacccggccagtttg

SEQ ID NO: 338 - DNA, 20 bp, Arachis hypogaea
  source 1..20: mol_type = other DNA
aagaaagaggtacctcaaac

SEQ ID NO: 339 - DNA, 20 bp, Arachis hypogaea
  source 1..20: mol_type = other DNA
atatatatgtgagaagaaag

SEQ ID NO: 340 - DNA, 20 bp, Arachis hypogaea
  source 1..20: mol_type = other DNA
ttctcacatatatattcaag

SEQ ID NO: 341 - DNA, 5454 bp, Arachis hypogaea
  source 1..5454: mol_type = other DNA
aagaagctttatttgtcacaggagaagtacataaagaaggtgtttcaaaggtttggcatgaatgatgccaaatgtgttgctagttcttttgctcctcattttaagttgagcaccaagcagtgtccaaccactgatgaagagaaacaagcaatggatgaaatttcttatgccttagctgttggaagcttgatgtatgttatggtgtgtactagaccagacattgctcatgcggttggtactgtgagtcattttctctctaatccagggaaagaacattggaatgttattaaatggattatgagatatctcaaaggtacaactaacttgagtttgagttttggtggtgagaaacctttactagttggctttactgatgcagacatgacaggagatattgattctcgaaagtttacttcagattatttggtcaagtttgcaggggaagctatttcatggcagtcaaggctacagaagtgtgttccactttctaccacagaggtaaagtttattgcatcaactgaagcatgtaaagagttgttgggatgaagaagtttcttgcagcacttggtttcaagcaagactgttatgtgttgttgtgtgatagccaaagtgctattcatcttgccaagaattatacttttcatgcaagatctaaacatattgatgttaggtatcactggatacggggtgtgttagattccaaattgttggaacttgagaaagttcacactgatgacaatggtgctgatatgatgacaaaagcattgtcaagagataagtttgaaacatgttgtttgatcgccggaatggcgatggcctccacctagtcgagaagggggagatttgttgggttttttctcttctttgtgagacccaagcccaacattttgagggtgtcactttgcacttattgtgacacaaccctaatcagatttttggggtcaatttgagagaaagagagtagccaccaaagagagaaagaagcgagaaaacagaattttcgtttttatcaaaagcagtaaacttcaaatggtagtttctcattagttcaccgttggatcggcttgaaatttgaactgcgtgtttctctcatcttgttcttcattctggacggtggagatgttgattgaaagtctgcagtgagagaaattggcttcgcaagagaaaaattaggttttccatttttacacagagtagcaatttttgaacggcagtttctcattttttcaccgttggatcgacgtgaaatttggacagtaaattcttcatatcttgttcttcatagttgctgccacattgtgttgtgagtgcttccatactattgttgtattggatatttgtgttatttttgctgatagactctttcaataatgtctaggaaaatagtagataaacaaaagcttaattatgaagaaaaagagaaacttaaacgaaaagataaatgttggttaaaactgttgattattccaatcttttcccaatagaataaattatgccccaattattttatcaatatgttaattaggaatgaacattttggagattgtatcataagttttaattaagaatgtgattactttgtttccatagttggattatcttttgtagaataacgagggtataatctctaatatacatttgtcggccttaggttgtgttattaatgcttctcatacggtaccacaactctgtagctagagcttgcgattatattgaacagaatagagatgatatcaaaaagaaagaaggaacaaattaaacgtatgtgatgtttaaatggatatgaaattttggtcaatgaagacatgtatgatttcgcttgtgatacgcagatacgctaaaaggcaagccaataccgtaaggtaggggtgcatatgtgccgggtgaagtcgggtttgatgtgacccagacccgatccgaaatatacaccgggtttatttattagacccgaacccgaccctagacccgatgaaaccaatacactttcgggccacaattataccgggtaaaaaccgggtgaaaaccgggccattaacattacattacgttgataccttcttgtaagctagcatgtaaaaatatccaaattttcaagactccaaccattatttaacatggtaaaattcacttagaaaaatataacaaaaaccaacccttctttaaaattaaagcataaccacaatccatactaaagcaaaaccacaatcaatactaatattgtctaataataccaaatatttaaatcaatacaaataacacaatattatgcattagtctaaagtcttatgcattctaaacataaaatattaacttatagtcttataatgactaataaaacaaaatattaaagtttacaatacttaaattccacataagaatagtcatgatccatcactaataacacaaaatattaattgtgtatgatgaccgggccaccaggccgacttcgggtgacccgagctatggcccggacccgacccgaaataatgaccgggtctatttttgagacccttacccgaccctaaacccgatgaaatcataccaaattagcccctaaaatgttcgggaccgggccgggccttcgggccgggccgggtctgtgcacccctaccgtaaggatagctgaatgggtgatgatattttatcaaaagacaaaaggaatccatcctgtatgtgcagtggaaccttttcccagacaatggagtgatgaacattatatatatcgccgcgtccatcaccatacatatccaaagcaaaaaatttaacaaatactgaaccccaattgccatgcatattaacacgtacactctctatgtcaatgtgtccaccatgcaccacaatccatccatctcttgtttatctctaagccaagacctagtgttgttgccacctcacatttctcaatttcaacactcgtcaacctgcatgccactccaatgcccaagtgtacatccatatcatcctaacgcaactatataaataccactcacctccctccatcatttcaccatccacactcataataatcatatatattcatcaatcatctatataagtagtagcaggagcaatgagagggagggtttctccactgatgctgttgctagggatccttgtcctggcttcagtttctgcaacgcatgccaagtcatcaccttaccagaagaaaacagagaacccctgcgcccagaggtgcctccagagttgtcaacaggaaccggatgacttgaagcaaaaggcatgcgagtctcgctgcaccaagctcgagtatgatcctcgttgtgtctatgatcctcgaggacacactggcaccaccaaccaacgttcccctccaggggagcggacacgtggccgccaacccggagactacgatgatgaccgccgtcaaccccgaagagaggaaggaggccgatggggaccagctggaccgagggagcgtgaaagagaagaagactggagacaaccaagagaagattggaggcgaccaagtcatcagcagccacggaaaataaggcccgaaggaagagaaggagaacaagagtggggaacaccaggtagccatgtgagggaagaaacatctcggaacaaccctttctacttcccgtcaaggcggtttagcacccgctacgggaaccaaaacggtaggatccgggtcctgcagaggtttgaccaaaggtcaaggcagtttcagaatctccagaatcaccgtattgtgcagatcgaggccaaacctaacactcttgttcttcccaagcacgctgatgctgataacatccttgttatccagcaaggtatcaaatctaattctattctaaactacatatattttgttgcttgatacatatgattcattggattgcagggcaagccaccgtgaccgtagcaaatggcaataacagaaagagctttaatcttgacgagggccatgcactcagaatcccatccggtttcatttcctacatcttgaaccgccatgacaaccagaacctcagagtagctaaaatctccatgcccgttaacacacccggccagtttgaggtacctctttcttctcacatatatattcaagaggaatgttaggaggccagcaacttttgtaatttgtagttatcaaatagtcattagtgatgatattaatgttattaataatgattttaatggtgtaaaattttatctaatggttcatttttttttttttgatacatgttggtcagaatttaacaaattactggtcctagatttttcttatattcaattctcaattatcatcttacatgttgcttcacaggatttcttcccggcgagcagccgagaccaatcatcctacttgcagggcttcagcaggaatacgttggaggccgccttcaatgtaagcaaatgtatcataattatggaattaaaataacgatcatgttataataaacttataatatatatacataggcggaattcaatgagatacggagggtgctgttagaagagaatgcaggaggtgagcaagaggagagagggcagaggcgatggagtactcggagtagtgagaacaatgaaggagtgatagtcaaagtgtcaaaggagcacgttgaagaacttactaagcacgctaaatccgtctcaaagaaaggctccgaagaagagggagatatcaccaacccaatcaacttgagagaaggcgagcccgatctttctaacaactttgggaagttatttgaggtgaagccagacaagaagaacccccagcttcaggacctggacatgatgctcacctgtgtagagatcaaagaaggagctttgatgctcccacacttcaactcaaaggccatggttatcgtcgtcgtcaacaaaggaactggaaaccttgaactcgtggctgtaagaaaagagcaacaacagaggggacggcgggaagaagaggaggacgaagacgaagaagaggagggaagtaacagagaggtgcgtaggtacacagcgaggttgaaggaaggcgatgtgttcatcatgccagcagctcatccagtagccatcaacgcttcctccgaactccatctgcttggcttcggtatcaacgctgaaaacaaccacagaatcttccttgcaggtgataaggacaatgtgatagaccagatagagaagcaagcgaaggatttagcattccctgggtcgggtgaacaagttgagaagctcatcaaaaaccagaaggaatctcactttgtgagtgctcgtcctcaatctcaatctcaatctccgtcgtctcctgagaaagagtctcctgagaaagaggatcaagaggaggaaaaccaaggagggaagggtccactcctttcaattttgaaggcttttaactgagaatggaggcaacttgttatgtatcgataataagatcacgcttttgtactctactatccaaaaacttatcaataaataaaaacgtttgtgcgttgtttctccaagaaa

SEQ ID NO: 342 - protein, 614 aa, Arachis hypogaea
MRGRVSPLMLLLGILVLASVSATQAKSPYRKTENPCAQRCLQSCQQEPDDLKQKACESRCTKLEYDPRCVYDTGATNQRHPPGERTRGRQPGDYDDDRRQPRREEGGRWGPAEPREREREEDWRQPREDWRRPSHQQPRKIRPEGREGEQEWGTPGSEVREETSRNNPFYFPSRRFSTRYGNQNGRIRVLQRFDQRSKQFQNLQNHRIVQIEARPNTLVLPKHADADNILVIQQGQATVTVANGNNRKSFNLDEGHALRIPSGFISYILNRHDNQNLRVAKISMPVNTPGQFEDFFPASSRDQSSYLQGFSRNTLEAAFNAEFNEIRRVLLEENAGGEQEERGQRRRSTRSSDNEGVIVKVSKEHVQELTKHAKSVSKKGSEEEDITNPINLRDGEPDLSNNFGRLFEVKPDKKNPQLQDLDMMLTCVEIKEGALMLPHFNSKAMVIVVVNKGTGNLELVAVRKEQQQRGRREQEWEEEEEDEEEEGSNREVRRYTARLKEGDVFIMPAAHPVAINASSELHLLGFGINAENNHRIFLAGDKDNVIDQIEKQAKDLAFPGSGEQVEKLIKNQRESHFVSARPQSQSPSSPEKEDQEEENQGGKGPLLSILKAFN

SEQ ID NO: 343 - DNA, 20 bp, Arachis hypogaea
  source 1..20: mol_type = other DNA
acaggagaagtacataaaga

SEQ ID NO: 344 - DNA, 20 bp, Arachis hypogaea
  source 1..20: mol_type = other DNA
acataaagaaggtgtttcaa

SEQ ID NO: 345 - DNA, 20 bp, Arachis hypogaea
  source 1..20: mol_type = other DNA
aagaaggtgtttcaaaggtt

SEQ ID NO: 346 - DNA, 20 bp, Arachis hypogaea
  source 1..20: mol_type = other DNA
aaaagaactagcaacacatt

SEQ ID NO: 347 - DNA, 20 bp, Arachis hypogaea
  source 1..20: mol_type = other DNA
ttggtgctcaacttaaaatg

SEQ ID NO: 348 - DNA, 20 bp, Arachis hypogaea
  source 1..20: mol_type = other DNA
atcagtggttggacactgct

SEQ ID NO: 349 - DNA, 20 bp, Arachis hypogaea
  source 1..20: mol_type = other DNA
tgtttctcttcatcagtggt

SEQ ID NO: 350 - DNA, 20 bp, Arachis hypogaea
  source 1..20: mol_type = other DNA
tgcttgtttctcttcatcag

SEQ ID NO: 351 - DNA, 20 bp, Arachis hypogaea
  source 1..20: mol_type = other DNA
tgatgaagagaaacaagcaa

SEQ ID NO: 352 - DNA, 20 bp, Arachis hypogaea
  source 1..20: mol_type = other DNA
catcaagcttccaacagcta

SEQ ID NO: 353 - DNA, 20 bp, Arachis hypogaea
  source 1..20: mol_type = other DNA
atttcttatgccttagctgt

SEQ ID NO: 354 - DNA, 20 bp, Arachis hypogaea
  source 1..20: mol_type = other DNA
tggaagcttgatgtatgtta

SEQ ID NO: 355 - DNA, 20 bp, Arachis hypogaea
  source 1..20: mol_type = other DNA
ccaaccgcatgagcaatgtc

SEQ ID NO: 356 - DNA, 20 bp, Arachis hypogaea
  source 1..20: mol_type = other DNA
tagaccagacattgctcatg

SEQ ID NO: 357 - DNA, 20 bp, Arachis hypogaea
  source 1..20: mol_type = other DNA
ccagacattgctcatgcggt

SEQ ID NO: 358 - DNA, 20 bp, Arachis hypogaea
  source 1..20: mol_type = other DNA
agtcattttctctctaatcc

SEQ ID NO: 359 - DNA, 20 bp, Arachis hypogaea
  source 1..20: mol_type = other DNA
gtcattttctctctaatcca

SEQ ID NO: 360 - DNA, 20 bp, Arachis hypogaea
  source 1..20: mol_type = other DNA
acattccaatgttctttccc

SEQ ID NO: 361 - DNA, 20 bp, Arachis hypogaea
  source 1..20: mol_type = other DNA
ctaatccagggaaagaacat

SEQ ID NO: 362 - DNA, 20 bp, Arachis hypogaea
  source 1..20: mol_type = other DNA
aacattggaatgttattaaa

SEQ ID NO: 363 - DNA, 20 bp, Arachis hypogaea
  source 1..20: mol_type = other DNA
tggattatgagatatctcaa

SEQ ID NO: 364 - DNA, 20 bp, Arachis hypogaea
  source 1..20: mol_type = other DNA
actaacttgagtttgagttt

SEQ ID NO: 365 - DNA, 20 bp, Arachis hypogaea
  source 1..20: mol_type = other DNA
aacttgagtttgagttttgg

SEQ ID NO: 366 - DNA, 20 bp, Arachis hypogaea
  source 1..20: mol_type = other DNA
tcagtaaagccaactagtaa

SEQ ID NO: 367 - DNA, 20 bp, Arachis hypogaea
  source 1..20: mol_type = other DNA
ggtgagaaacctttactagt

SEQ ID NO: 368 - DNA, 20 bp, Arachis hypogaea
  source 1..20: mol_type = other DNA
tttactgatgcagacatgac

SEQ ID NO: 369 - DNA, 20 bp, Arachis hypogaea
  source 1..20: mol_type = other DNA
aaagtttacttcagattatt

SEQ ID NO: 370 - DNA, 20 bp, Arachis hypogaea
  source 1..20: mol_type = other DNA
gattatttggtcaagtttgc

SEQ ID NO: 371 - DNA, 20 bp, Arachis hypogaea
  source 1..20: mol_type = other DNA
attatttggtcaagtttgca

SEQ ID NO: 372 - DNA, 20 bp, Arachis hypogaea
  source 1..20: mol_type = other DNA
ttatttggtcaagtttgcag

SEQ ID NO: 373 - DNA, 20 bp, Arachis hypogaea
  source 1..20: mol_type = other DNA
ttgcaggggaagctatttca

SEQ ID NO: 374 - DNA, 20 bp, Arachis hypogaea
  source 1..20: mol_type = other DNA
aagctatttcatggcagtca

SEQ ID NO: 375 - DNA, 20 bp, Arachis hypogaea
  source 1..20: mol_type = other DNA
tttacctctgtggtagaaag

SEQ ID NO: 376 - DNA, 20 bp, Arachis hypogaea
  source 1..20: mol_type = other DNA
tgttccactttctaccacag

SEQ ID NO: 377 - DNA, 20 bp, Arachis hypogaea
  source 1..20: mol_type = other DNA
tgcaataaactttacctctg

SEQ ID NO: 378 - DNA, 20 bp, Arachis hypogaea
  source 1..20: mol_type = other DNA
tgaagcatgtaaagagttgt

SEQ ID NO: 379 - DNA, 20 bp, Arachis hypogaea
  source 1..20: mol_type = other DNA
gaagcatgtaaagagttgtt

SEQ ID NO: 380 - DNA, 20 bp, Arachis hypogaea
  source 1..20: mol_type = other DNA
aagaagtttcttgcagcact

SEQ ID NO: 381 - DNA, 20 bp, Arachis hypogaea
  source 1..20: mol_type = other DNA
tggcaagatgaatagcactt

SEQ ID NO: 382 - DNA, 20 bp, Arachis hypogaea
  source 1..20: mol_type = other DNA
tgcatgaaaagtataattct

SEQ ID NO: 383 - DNA, 20 bp, Arachis hypogaea
  source 1..20: mol_type = other DNA
gatctaaacatattgatgtt

SEQ ID NO: 384 - DNA, 20 bp, Arachis hypogaea
  source 1..20: mol_type = other DNA
atattgatgttaggtatcac

SEQ ID NO: 385 - DNA, 20 bp, Arachis hypogaea
  source 1..20: mol_type = other DNA
atgttaggtatcactggata

SEQ ID NO: 386 - DNA, 20 bp, Arachis hypogaea
  source 1..20: mol_type = other DNA
tgttaggtatcactggatac

SEQ ID NO: 387 - DNA, 20 bp, Arachis hypogaea
  source 1..20: mol_type = other DNA
gttaggtatcactggatacg

SEQ ID NO: 388 - DNA, 20 bp, Arachis hypogaea
  source 1..20: mol_type = other DNA
tgtgttagattccaaattgt

SEQ ID NO: 389 - DNA, 20 bp, Arachis hypogaea
  source 1..20: mol_type = other DNA
tttctcaagttccaacaatt

SEQ ID NO: 390 - DNA, 20 bp, Arachis hypogaea
  source 1..20: mol_type = other DNA
aaagttcacactgatgacaa

SEQ ID NO: 391 - DNA, 20 bp, Arachis hypogaea
  source 1..20: mol_type = other DNA
gaaacatgttgtttgatcgc

SEQ ID NO: 392 - DNA, 20 bp, Arachis hypogaea
  source 1..20: mol_type = other DNA
atgttgtttgatcgccggaa

SEQ ID NO: 393 - DNA, 20 bp, Arachis hypogaea
  source 1..20: mol_type = other DNA
ggtggaggccatcgccattc

SEQ ID NO: 394 - DNA, 20 bp, Arachis hypogaea
  source 1..20: mol_type = other DNA
tttgatcgccggaatggcga

SEQ ID NO: 395 - DNA, 20 bp, Arachis hypogaea
  source 1..20: mol_type = other DNA
cccccttctcgactaggtgg

SEQ ID NO: 396 - DNA, 20 bp, Arachis hypogaea
  source 1..20: mol_type = other DNA
tctcccccttctcgactagg

SEQ ID NO: 397 - DNA, 20 bp, Arachis hypogaea
  source 1..20: mol_type = other DNA
aaatctcccccttctcgact

SEQ ID NO: 398 - DNA, 20 bp, Arachis hypogaea
  source 1..20: mol_type = other DNA
tggcctccacctagtcgaga

SEQ ID NO: 399 - DNA, 20 bp, Arachis hypogaea
  source 1..20: mol_type = other DNA
ggcctccacctagtcgagaa

SEQ ID NO: 400 - DNA, 20 bp, Arachis hypogaea
  source 1..20: mol_type = other DNA
gcctccacctagtcgagaag

SEQ ID NO: 401 - DNA, 20 bp, Arachis hypogaea
  source 1..20: mol_type = other DNA
cctccacctagtcgagaagg

SEQ ID NO: 402 - DNA, 20 bp, Arachis hypogaea
  source 1..20: mol_type = other DNA
tcgagaagggggagatttgt

SEQ ID NO: 403 - DNA, 20 bp, Arachis hypogaea
  source 1..20: mol_type = other DNA
cgagaagggggagatttgtt

SEQ ID NO: 404 - DNA, 20 bp, Arachis hypogaea
  source 1..20: mol_type = other DNA
accctcaaaatgttgggctt

SEQ ID NO: 405 - DNA, 20 bp, Arachis hypogaea
  source 1..20: mol_type = other DNA
caccctcaaaatgttgggct

SEQ ID NO: 406 - DNA, 20 bp, Arachis hypogaea
  source 1..20: mol_type = other DNA
agtgacaccctcaaaatgtt

SEQ ID NO: 407 - DNA, 20 bp, Arachis hypogaea
  source 1..20: mol_type = other DNA
aagtgacaccctcaaaatgt

SEQ ID NO: 408 - DNA, 20 bp, Arachis hypogaea
  source 1..20: mol_type = other DNA
gacccaagcccaacattttg

SEQ ID NO: 409 - DNA, 20 bp, Arachis hypogaea
  source 1..20: mol_type = other DNA
acccaagcccaacattttga

SEQ ID NO: 410 - DNA, 20 bp, Arachis hypogaea
  source 1..20: mol_type = other DNA
tgaccccaaaaatctgatta

SEQ ID NO: 411 - DNA, 20 bp, Arachis hypogaea
  source 1..20: mol_type = other DNA
ttgaccccaaaaatctgatt

SEQ ID NO: 412 - DNA, 20 bp, Arachis hypogaea
  source 1..20: mol_type = other DNA
cacaaccctaatcagatttt

SEQ ID NO: 413 - DNA, 20 bp, Arachis hypogaea
  source 1..20: mol_type = other DNA
acaaccctaatcagattttt

SEQ ID NO: 414 - DNA, 20 bp, Arachis hypogaea
  source 1..20: mol_type = other DNA
caaccctaatcagatttttg

SEQ ID NO: 415 - DNA, 20 bp, Arachis hypogaea
  source 1..20: mol_type = other DNA
tcgcttctttctctctttgg

SEQ ID NO: 416 - DNA, 20 bp, Arachis hypogaea
  source 1..20: mol_type = other DNA
ttctcgcttctttctctctt

SEQ ID NO: 417 - DNA, 20 bp, Arachis hypogaea
  source 1..20: mol_type = other DNA
caaaagcagtaaacttcaaa

SEQ ID NO: 418 - DNA, 20 bp, Arachis hypogaea
  source 1..20: mol_type = other DNA
gtttctcattagttcaccgt

SEQ ID NO: 419 - DNA, 20 bp, Arachis hypogaea
  source 1..20: mol_type = other DNA
tcattagttcaccgttggat

SEQ ID NO: 420 - DNA, 20 bp, Arachis hypogaea
  source 1..20: mol_type = other DNA
caaatttcaagccgatccaa

SEQ ID NO: 421 - DNA, 20 bp, Arachis hypogaea
  source 1..20: mol_type = other DNA
tctcatcttgttcttcattc

SEQ ID NO: 422 - DNA, 20 bp, Arachis hypogaea
  source 1..20: mol_type = other DNA
atcttgttcttcattctgga

SEQ ID NO: 423 - DNA, 20 bp, Arachis hypogaea
  source 1..20: mol_type = other DNA
ttgttcttcattctggacgg

SEQ ID NO: 424 - DNA, 20 bp, Arachis hypogaea
  source 1..20: mol_type = other DNA
aagtctgcagtgagagaaat

SEQ ID NO: 425 - DNA, 20 bp, Arachis hypogaea
  source 1..20: mol_type = other DNA
ggcttcgcaagagaaaaatt

SEQ ID NO: 426 - DNA, 20 bp, Arachis hypogaea
  source 1..20: mol_type = other DNA
attgctactctgtgtaaaaa

SEQ ID NO: 427 - DNA, 20 bp, Arachis hypogaea
  source 1..20: mol_type = other DNA
acagagtagcaatttttgaa

SEQ ID NO: 428 - DNA, 20 bp, Arachis hypogaea
  source 1..20: mol_type = other DNA
gtttctcattttttcaccgt

SEQ ID NO: 429 - DNA, 20 bp, Arachis hypogaea
  source 1..20: mol_type = other DNA
caaatttcacgtcgatccaa

SEQ ID NO: 430 - DNA, 20 bp, Arachis hypogaea
  source 1..20: mol_type = other DNA
cgttggatcgacgtgaaatt

SEQ ID NO: 431 - DNA, 20 bp, Arachis hypogaea
  source 1..20: mol_type = other DNA
gaagcactcacaacacaatg

SEQ ID NO: 432 - DNA, 20 bp, Arachis hypogaea
  source 1..20: mol_type = other DNA
tatccaatacaacaatagta

SEQ ID NO: 433 - DNA, 20 bp, Arachis hypogaea
  source 1..20: mol_type = other DNA
cttccatactattgttgtat

SEQ ID NO: 434 - DNA, 20 bp, Arachis hypogaea
  source 1..20: mol_type = other DNA
agactctttcaataatgtct

SEQ ID NO: 435 - DNA, 20 bp, Arachis hypogaea
  source 1..20: mol_type = other DNA
ttaaacgaaaagataaatgt

SEQ ID NO: 436 - DNA, 20 bp, Arachis hypogaea
  source 1..20: mol_type = other DNA
ttattctattgggaaaagat

SEQ ID NO: 437 - DNA, 20 bp, Arachis hypogaea
  source 1..20: mol_type = other DNA
ggggcataatttattctatt

SEQ ID NO: 438 - DNA, 20 bp, Arachis hypogaea
  source 1..20: mol_type = other DNA
tggggcataatttattctat

SEQ ID NO: 439 - DNA, 20 bp, Arachis hypogaea
  source 1..20: mol_type = other DNA
acatattgataaaataattg

SEQ ID NO: 440 - DNA, 20 bp, Arachis hypogaea
  source 1..20: mol_type = other DNA
aacatattgataaaataatt

SEQ ID NO: 441 - DNA, 20 bp, Arachis hypogaea
  source 1..20: mol_type = other DNA
taacatattgataaaataat

SEQ ID NO: 442 - DNA, 20 bp, Arachis hypogaea
  source 1..20: mol_type = other DNA
attttatcaatatgttaatt

SEQ ID NO: 443 - DNA, 20 bp, Arachis hypogaea
  source 1..20: mol_type = other DNA
ttaattaggaatgaacattt

SEQ ID NO: 444 - DNA, 20 bp, Arachis hypogaea
  source 1..20: mol_type = other DNA
gattactttgtttccatagt

SEQ ID NO: 445 - DNA, 20 bp, Arachis hypogaea
  source 1..20: mol_type = other DNA
tacaaaagataatccaacta

SEQ ID NO: 446 - DNA, 20 bp, Arachis hypogaea
  source 1..20: mol_type = other DNA
ttatcttttgtagaataacg

SEQ ID NO: 447 - DNA, 20 bp, Arachis hypogaea
  source 1..20: mol_type = other DNA
tatcttttgtagaataacga

SEQ ID NO: 448 - DNA, 20 bp, Arachis hypogaea
  source 1..20: mol_type = other DNA
aatctctaatatacatttgt

SEQ ID NO: 449 - DNA, 20 bp, Arachis hypogaea
  source 1..20: mol_type = other DNA
aatatacatttgtcggcctt

SEQ ID NO: 450 - DNA, 20 bp, Arachis hypogaea
  source 1..20: mol_type = other DNA
agcattaataacacaaccta

SEQ ID NO: 451 - DNA, 20 bp, Arachis hypogaea
  source 1..20: mol_type = other DNA
tgttattaatgcttctcata

SEQ ID NO: 452 - DNA, 20 bp, Arachis hypogaea
  source 1..20: mol_type = other DNA
aagctctagctacagagttg

SEQ ID NO: 453 - DNA, 20 bp, Arachis hypogaea
  source 1..20: mol_type = other DNA
gatgatatcaaaaagaaaga

SEQ ID NO: 454 - DNA, 20 bp, Arachis hypogaea
  source 1..20: mol_type = other DNA
aaacgtatgtgatgtttaaa

SEQ ID NO: 455 - DNA, 20 bp, Arachis hypogaea
  source 1..20: mol_type = other DNA
tttaaatggatatgaaattt

SEQ ID NO: 456 - DNA, 20 bp, Arachis hypogaea
  source 1..20: mol_type = other DNA
tgatacgcagatacgctaaa

SEQ ID NO: 457 - DNA, 20 bp, Arachis hypogaea
  source 1..20: mol_type = other DNA
gcacccctaccttacggtat

SEQ ID NO: 458 - DNA, 20 bp, Arachis hypogaea
  source 1..20: mol_type = other DNA
aaaggcaagccaataccgta

SEQ ID NO: 459 - DNA, 20 bp, Arachis hypogaea
  source 1..20: mol_type = other DNA
gcaagccaataccgtaaggt

SEQ ID NO: 460 - DNA, 20 bp, Arachis hypogaea
  source 1..20: mol_type = other DNA
acatatgcacccctacctta

SEQ ID NO: 461 - DNA, 20 bp, Arachis hypogaea
  source 1..20: mol_type = other DNA
caagccaataccgtaaggta

SEQ ID NO: 462 - DNA, 20 bp, Arachis hypogaea
  source 1..20: mol_type = other DNA
aagccaataccgtaaggtag

SEQ ID NO: 463 - DNA, 20 bp, Arachis hypogaea
  source 1..20: mol_type = other DNA
aggtaggggtgcatatgtgc

SEQ ID NO: 464 - DNA, 20 bp, Arachis hypogaea
  source 1..20: mol_type = other DNA
ggtaggggtgcatatgtgcc

SEQ ID NO: 465 - DNA, 20 bp, Arachis hypogaea
  source 1..20: mol_type = other DNA
acatcaaacccgacttcacc

SEQ ID NO: 466 - DNA, 20 bp, Arachis hypogaea
  source 1..20: mol_type = other DNA
gcatatgtgccgggtgaagt

SEQ ID NO: 467 - DNA, 20 bp, Arachis hypogaea
  source 1..20: mol_type = other DNA
catatgtgccgggtgaagtc

SEQ ID NO: 468 - DNA, 20 bp, Arachis hypogaea
  source 1..20: mol_type = other DNA
gtatatttcggatcgggtct

SEQ ID NO: 469 - DNA, 20 bp, Arachis hypogaea
  source 1..20: mol_type = other DNA
tgtatatttcggatcgggtc

SEQ ID NO: 470 - DNA, 20 bp, Arachis hypogaea
  source 1..20: mol_type = other DNA
cccggtgtatatttcggatc

SEQ ID NO: 471 - DNA, 20 bp, Arachis hypogaea
  source 1..20: mol_type = other DNA
acccggtgtatatttcggat

SEQ ID NO: 472 - DNA, 20 bp, Arachis hypogaea
  source 1..20: mol_type = other DNA
aataaacccggtgtatattt

SEQ ID NO: 473 - DNA, 20 bp, Arachis hypogaea
  source 1..20: mol_type = other DNA
acccgatccgaaatatacac

SEQ ID NO: 474 - DNA, 20 bp, Arachis hypogaea
  source 1..20: mol_type = other DNA
cccgatccgaaatatacacc

SEQ ID NO: 475 - DNA, 20 bp, Arachis hypogaea
  source 1..20: mol_type = other DNA
tcgggtctaataaataaacc

SEQ ID NO: 476 - DNA, 20 bp, Arachis hypogaea
  source 1..20: mol_type = other DNA
tcgggtctagggtcgggttc

SEQ ID NO: 477 - DNA, 20 bp, Arachis hypogaea
  source 1..20: mol_type = other DNA
atcgggtctagggtcgggtt

SEQ ID NO: 478 - DNA, 20 bp, Arachis hypogaea
  source 1..20: mol_type = other DNA
gtttcatcgggtctagggtc

SEQ ID NO: 479 - DNA, 20 bp, Arachis hypogaea
  source 1..20: mol_type = other DNA
ggtttcatcgggtctagggt

SEQ ID NO: 480 - DNA, 20 bp, Arachis hypogaea
  source 1..20: mol_type = other DNA
tattggtttcatcgggtcta

SEQ ID NO: 481 - DNA, 20 bp, Arachis hypogaea
  source 1..20: mol_type = other DNA
gtattggtttcatcgggtct

SEQ ID NO: 482 - DNA, 20 bp, Arachis hypogaea
  source 1..20: mol_type = other DNA
gaaagtgtattggtttcatc

SEQ ID NO: 483 - DNA, 20 bp, Arachis hypogaea
  source 1..20: mol_type = other DNA
cgaaagtgtattggtttcat

SEQ ID NO: 484 - DNA, 20 bp, Arachis hypogaea
  source 1..20: mol_type = other DNA
attgtggcccgaaagtgtat

SEQ ID NO: 485 - DNA, 20 bp, Arachis hypogaea
  source 1..20: mol_type = other DNA
cgatgaaaccaatacacttt

SEQ ID NO: 486 - DNA, 20 bp, Arachis hypogaea
  source 1..20: mol_type = other DNA
gatgaaaccaatacactttc

SEQ ID NO: 487 - DNA, 20 bp, Arachis hypogaea
  source 1..20: mol_type = other DNA
gtttttacccggtataattg

SEQ ID NO: 488 - DNA, 20 bp, Arachis hypogaea
  source 1..20: mol_type = other DNA
ctttcgggccacaattatac

SEQ ID NO: 489 - DNA, 20 bp, Arachis hypogaea
  source 1..20: mol_type = other DNA
tttcgggccacaattatacc

SEQ ID NO: 490 - DNA, 20 bp, Arachis hypogaea
  source 1..20: mol_type = other DNA
gttttcacccggtttttacc

SEQ ID NO: 491 - DNA, 20 bp, Arachis hypogaea
  source 1..20: mol_type = other DNA
caattataccgggtaaaaac

SEQ ID NO: 492 - DNA, 20 bp, Arachis hypogaea
  source 1..20: mol_type = other DNA
aattataccgggtaaaaacc

SEQ ID NO: 493 - DNA, 20 bp, Arachis hypogaea
  source 1..20: mol_type = other DNA
ttaatggcccggttttcacc

SEQ ID NO: 494 - DNA, 20 bp, Arachis hypogaea
  source 1..20: mol_type = other DNA
ggtaaaaaccgggtgaaaac

SEQ ID NO: 495 - DNA, 20 bp, Arachis hypogaea
  source 1..20: mol_type = other DNA
gtaaaaaccgggtgaaaacc

SEQ ID NO: 496 - DNA, 20 bp, Arachis hypogaea
  source 1..20: mol_type = other DNA
gtaatgtaatgttaatggcc

SEQ ID NO: 497 - DNA, 20 bp, Arachis hypogaea
  source 1..20: mol_type = other DNA
tcaacgtaatgtaatgttaa

SEQ ID NO: 498 - DNA, 20 bp, Arachis hypogaea
  source 1..20: mol_type = other DNA
ttacatgctagcttacaaga

SEQ ID NO: 499 - DNA, 20 bp, Arachis hypogaea
  source 1..20: mol_type = other DNA
tggttggagtcttgaaaatt

SEQ ID NO: 500 - DNA, 20 bp, Arachis hypogaea
  source 1..20: mol_type = other DNA
ttaccatgttaaataatggt

SEQ ID NO: 501 - DNA, 20 bp, Arachis hypogaea
  source 1..20: mol_type = other DNA
aattttaccatgttaaataa

SEQ ID NO: 502 - DNA, 20 bp, Arachis hypogaea
  source 1..20: mol_type = other DNA
actccaaccattatttaaca

SEQ ID NO: 503 - DNA, 20 bp, Arachis hypogaea
  source 1..20: mol_type = other DNA
ctttaattttaaagaagggt

SEQ ID NO: 504 - DNA, 20 bp, Arachis hypogaea
  source 1..20: mol_type = other DNA
tatgctttaattttaaagaa

SEQ ID NO: 505 - DNA, 20 bp, Arachis hypogaea
  source 1..20: mol_type = other DNA
ttatgctttaattttaaaga

SEQ ID NO: 506 - DNA, 20 bp, Arachis hypogaea
  source 1..20: mol_type = other DNA
ttttgctttagtatggattg

SEQ ID NO: 507 - DNA, 20 bp, Arachis hypogaea
  source 1..20: mol_type = other DNA
attgtggttttgctttagta

SEQ ID NO: 508 - DNA, 20 bp, Arachis hypogaea
  source 1..20: mol_type = other DNA
gacaatattagtattgattg

SEQ ID NO: 509 - DNA, 20 bp, Arachis hypogaea
  source 1..20: mol_type = other DNA
tttgtattgatttaaatatt

SEQ ID NO: 510 - DNA, 20 bp, Arachis hypogaea
  source 1..20: mol_type = other DNA
ggatcatgactattcttatg

SEQ ID NO: 511 - DNA, 20 bp, Arachis hypogaea
  source 1..20: mol_type = other DNA
atattttgtgttattagtga

SEQ ID NO: 512 - DNA, 20 bp, Arachis hypogaea
  source 1..20: mol_type = other DNA
tattaattgtgtatgatgac

SEQ ID NO: 513 - DNA, 20 bp, Arachis hypogaea
  source 1..20: mol_type = other DNA
attaattgtgtatgatgacc

SEQ ID NO: 514 - DNA, 20 bp, Arachis hypogaea
  source 1..20: mol_type = other DNA
ccgaagtcggcctggtggcc

SEQ ID NO: 515 - DNA, 20 bp, Arachis hypogaea
  source 1..20: mol_type = other DNA
tgtatgatgaccgggccacc

SEQ ID NO: 516 - DNA, 20 bp, Arachis hypogaea
  source 1..20: mol_type = other DNA
gtcacccgaagtcggcctgg

SEQ ID NO: 517 - DNA, 20 bp, Arachis hypogaea
  source 1..20: mol_type = other DNA
cgggtcacccgaagtcggcc

SEQ ID NO: 518 - DNA, 20 bp, Arachis hypogaea
  source 1..20: mol_type = other DNA
ccgggccaccaggccgactt

SEQ ID NO: 519 - DNA, 20 bp, Arachis hypogaea
  source 1..20: mol_type = other DNA
cgggccaccaggccgacttc

SEQ ID NO: 520 - DNA, 20 bp, Arachis hypogaea
  source 1..20: mol_type = other DNA
tagctcgggtcacccgaagt

SEQ ID NO: 521 - DNA, 20 bp, Arachis hypogaea
  source 1..20: mol_type = other DNA
acttcgggtgacccgagcta

SEQ ID NO: 522 - DNA, 20 bp, Arachis hypogaea
  source 1..20: mol_type = other DNA
tcgggtccgggccatagctc

SEQ ID NO: 523 - DNA, 20 bp, Arachis hypogaea
  source 1..20: mol_type = other DNA
gtcgggtccgggccatagct

SEQ ID NO: 524 - DNA, 20 bp, Arachis hypogaea
  source 1..20: mol_type = other DNA
gggtgacccgagctatggcc

SEQ ID NO: 525 - DNA, 20 bp, Arachis hypogaea
  source 1..20: mol_type = other DNA
cattatttcgggtcgggtcc

SEQ ID NO: 526 - DNA, 20 bp, Arachis hypogaea
  source 1..20: mol_type = other DNA
tcattatttcgggtcgggtc

SEQ ID NO: 527 - DNA, 20 bp, Arachis hypogaea
  source 1..20: mol_type = other DNA
cccggtcattatttcgggtc

SEQ ID NO: 528 - DNA, 20 bp, Arachis hypogaea
  source 1..20: mol_type = other DNA
acccggtcattatttcgggt

SEQ ID NO: 529 - DNA, 20 bp, Arachis hypogaea
  source 1..20: mol_type = other DNA
atagacccggtcattatttc

SEQ ID NO: 530 - DNA, 20 bp, Arachis hypogaea
  source 1..20: mol_type = other DNA
aatagacccggtcattattt

SEQ ID NO: 531 - DNA, 20 bp, Arachis hypogaea
  source 1..20: mol_type = other DNA
acccgacccgaaataatgac

SEQ ID NO: 532 - DNA, 20 bp, Arachis hypogaea
  source 1..20: mol_type = other DNA
cccgacccgaaataatgacc

SEQ ID NO: 533 - DNA, 20 bp, Arachis hypogaea
  source 1..20: mol_type = other DNA
aagggtctcaaaaatagacc

SEQ ID NO: 534 - DNA, 20 bp, Arachis hypogaea
  source 1..20: mol_type = other DNA
tcgggtttagggtcgggtaa

SEQ ID NO: 535 - DNA, 20 bp, Arachis hypogaea
  source 1..20: mol_type = other DNA
atcgggtttagggtcgggta

SEQ ID NO: 536 - DNA, 20 bp, Arachis hypogaea
  source 1..20: mol_type = other DNA
atttcatcgggtttagggtc

SEQ ID NO: 537 - DNA, 20 bp, Arachis hypogaea
  source 1..20: mol_type = other DNA
gatttcatcgggtttagggt

SEQ ID NO: 538 - DNA, 20 bp, Arachis hypogaea
  source 1..20: mol_type = other DNA
gtatgatttcatcgggttta

SEQ ID NO: 539 - DNA, 20 bp, Arachis hypogaea
  source 1..20: mol_type = other DNA
ggtatgatttcatcgggttt

SEQ ID NO: 540 - DNA, 20 bp, Arachis hypogaea
  source 1..20: mol_type = other DNA
taatttggtatgatttcatc

SEQ ID NO: 541 - DNA, 20 bp, Arachis hypogaea
  source 1..20: mol_type = other DNA
ctaatttggtatgatttcat

SEQ ID NO: 542 - DNA, 20 bp, Arachis hypogaea
  source 1..20: mol_type = other DNA
gaacattttaggggctaatt

SEQ ID NO: 543 - DNA, 20 bp, Arachis hypogaea
  source 1..20: mol_type = other DNA
cccggtcccgaacattttag

SEQ ID NO: 544 - DNA, 20 bp, Arachis hypogaea
  source 1..20: mol_type = other DNA
gcccggtcccgaacatttta

SEQ ID NO: 545 - DNA, 20 bp, Arachis hypogaea
  source 1..20: mol_type = other DNA
ggcccggtcccgaacatttt

SEQ ID NO: 546 - DNA, 20 bp, Arachis hypogaea
  source 1..20: mol_type = other DNA
aaattagcccctaaaatgtt

SEQ ID NO: 547 - DNA, 20 bp, Arachis hypogaea
  source 1..20: mol_type = other DNA
aattagcccctaaaatgttc

SEQ ID NO: 548 - DNA, 20 bp, Arachis hypogaea
  source 1..20: mol_type = other DNA
gcccctaaaatgttcgggac

SEQ ID NO: 549 - DNA, 20 bp, Arachis hypogaea
  source 1..20: mol_type = other DNA
cccctaaaatgttcgggacc

SEQ ID NO: 550 - DNA, 20 bp, Arachis hypogaea
  source 1..20: mol_type = other DNA
taaaatgttcgggaccgggc

SEQ ID NO: 551 - DNA, 20 bp, Arachis hypogaea
  source 1..20: mol_type = other DNA
aaaatgttcgggaccgggcc

SEQ ID NO: 552 - DNA, 20 bp, Arachis hypogaea
  source 1..20: mol_type = other DNA
cccggcccgaaggcccggcc

SEQ ID NO: 553 - DNA, 20 bp, Arachis hypogaea
  source 1..20: mol_type = other DNA
tcgggaccgggccgggcctt

SEQ ID NO: 554 - DNA, 20 bp, Arachis hypogaea
  source 1..20: mol_type = other DNA
cccggcccggcccgaaggcc

SEQ ID NO: 555 - DNA, 20 bp, Arachis hypogaea
  source 1..20: mol_type = other DNA
cgggaccgggccgggccttc

SEQ ID NO: 556 - DNA, 20 bp, Arachis hypogaea
  source 1..20: mol_type = other DNA
accgggccgggccttcgggc

SEQ ID NO: 557 - DNA, 20 bp, Arachis hypogaea
  source 1..20: mol_type = other DNA
acagacccggcccggcccga

SEQ ID NO: 558 - DNA, 20 bp, Arachis hypogaea
  source 1..20: mol_type = other DNA
ccgggccgggccttcgggcc

SEQ ID NO: 559 - DNA, 20 bp, Arachis hypogaea
  source 1..20: mol_type = other DNA
gccgggccttcgggccgggc

SEQ ID NO: 560 - DNA, 20 bp, Arachis hypogaea
  source 1..20: mol_type = other DNA
ccgggccttcgggccgggcc

SEQ ID NO: 561 - DNA, 20 bp, Arachis hypogaea
  source 1..20: mol_type = other DNA
aggggtgcacagacccggcc

SEQ ID NO: 562 - DNA, 20 bp, Arachis hypogaea
  source 1..20: mol_type = other DNA
acggtaggggtgcacagacc

SEQ ID NO: 563 - DNA, 20 bp, Arachis hypogaea
  source 1..20: mol_type = other DNA
ttcagctatccttacggtag

SEQ ID NO: 564 - DNA, 20 bp, Arachis hypogaea
  source 1..20: mol_type = other DNA
attcagctatccttacggta

SEQ ID NO: 565 - DNA, 20 bp, Arachis hypogaea
  source 1..20: mol_type = other DNA
gtctgtgcacccctaccgta

SEQ ID NO: 566 - DNA, 20 bp, Arachis hypogaea
  source 1..20: mol_type = other DNA
cattcagctatccttacggt

SEQ ID NO: 567 - DNA, 20 bp, Arachis hypogaea
  source 1..20: mol_type = other DNA
cacccattcagctatcctta

SEQ ID NO: 568 - DNA, 20 bp, Arachis hypogaea
  source 1..20: mol_type = other DNA
ctaccgtaaggatagctgaa

SEQ ID NO: 569 - DNA, 20 bp, Arachis hypogaea
  source 1..20: mol_type = other DNA
taccgtaaggatagctgaat

SEQ ID NO: 570 - DNA, 20 bp, Arachis hypogaea
  source 1..20: mol_type = other DNA
atattttatcaaaagacaaa

SEQ ID NO: 571 - DNA, 20 bp, Arachis hypogaea
  source 1..20: mol_type = other DNA
gttccactgcacatacagga

SEQ ID NO: 572 - DNA, 20 bp, Arachis hypogaea
  source 1..20: mol_type = other DNA
aaaggttccactgcacatac

SEQ ID NO: 573 - DNA, 20 bp, Arachis hypogaea
  source 1..20: mol_type = other DNA
aatccatcctgtatgtgcag

SEQ ID NO: 574 - DNA, 20 bp, Arachis hypogaea
  source 1..20: mol_type = other DNA
tcactccattgtctgggaaa

SEQ ID NO: 575 - DNA, 20 bp, Arachis hypogaea
  source 1..20: mol_type = other DNA
tggaaccttttcccagacaa

SEQ ID NO: 576 - DNA, 20 bp, Arachis hypogaea
  source 1..20: mol_type = other DNA
tgttcatcactccattgtct

SEQ ID NO: 577 - DNA, 20 bp, Arachis hypogaea
  source 1..20: mol_type = other DNA
atgttcatcactccattgtc

SEQ ID NO: 578 - DNA, 20 bp, Arachis hypogaea
  source 1..20: mol_type = other DNA
gatatgtatggtgatggacg

SEQ ID NO: 579 - DNA, 20 bp, Arachis hypogaea
  source 1..20: mol_type = other DNA
gctttggatatgtatggtga

SEQ ID NO: 580 - DNA, 20 bp, Arachis hypogaea
  source 1..20: mol_type = other DNA
ttttttgctttggatatgta

SEQ ID NO: 581 - DNA, 20 bp, Arachis hypogaea
  source 1..20: mol_type = other DNA
atttgttaaattttttgctt

SEQ ID NO: 582 - DNA, 20 bp, Arachis hypogaea
  source 1..20: mol_type = other DNA
gttaatatgcatggcaattg

SEQ ID NO: 583 - DNA, 20 bp, Arachis hypogaea
  source 1..20: mol_type = other DNA
tgttaatatgcatggcaatt

SEQ ID NO: 584 - DNA, 20 bp, Arachis hypogaea
  source 1..20: mol_type = other DNA
gtgttaatatgcatggcaat

SEQ ID NO: 585 - DNA, 20 bp, Arachis hypogaea
  source 1..20: mol_type = other DNA
agtgtacgtgttaatatgca

SEQ ID NO: 586 - DNA, 20 bp, Arachis hypogaea
  source 1..20: mol_type = other DNA
ggatggattgtggtgcatgg

SEQ ID NO: 587 - DNA, 20 bp, Arachis hypogaea
  source 1..20: mol_type = other DNA
gatggatggattgtggtgca

SEQ ID NO: 588 - DNA, 20 bp, Arachis hypogaea
  source 1..20: mol_type = other DNA
aacaagagatggatggattg

SEQ ID NO: 589 - DNA, 20 bp, Arachis hypogaea
  source 1..20: mol_type = other DNA
agagataaacaagagatgga

SEQ ID NO: 590 - DNA, 20 bp, Arachis hypogaea
  source 1..20: mol_type = other DNA
gcttagagataaacaagaga

SEQ ID NO: 591 - DNA, 20 bp, Arachis hypogaea
  source 1..20: mol_type = other DNA
gtggcaacaacactaggtct

SEQ ID NO: 592 - DNA, 20 bp, Arachis hypogaea
  source 1..20: mol_type = other DNA
tgtgaggtggcaacaacact

SEQ ID NO: 593 - DNA, 20 bp, Arachis hypogaea
  source 1..20: mol_type = other DNA
tgaaattgagaaatgtgagg

SEQ ID NO: 594 - DNA, 20 bp, Arachis hypogaea
  source 1..20: mol_type = other DNA
tgttgaaattgagaaatgtg

SEQ ID NO: 595 - DNA, 20 bp, Arachis hypogaea
  source 1..20: mol_type = other DNA
tgggcattggagtggcatgc

SEQ ID NO: 596 - DNA, 20 bp, Arachis hypogaea
  source 1..20: mol_type = other DNA
tgtacacttgggcattggag

SEQ ID NO: 597 - DNA, 20 bp, Arachis hypogaea
  source 1..20: mol_type = other DNA
atggatgtacacttgggcat

SEQ ID NO: 598 - DNA, 20 bp, Arachis hypogaea
  source 1..20: mol_type = other DNA
gatgatatggatgtacactt

SEQ ID NO: 599 - DNA, 20 bp, Arachis hypogaea
  source 1..20: mol_type = other DNA
ggatgatatggatgtacact

SEQ ID NO: 600 - DNA, 20 bp, Arachis hypogaea
  source 1..20: mol_type = other DNA
atagttgcgttaggatgata

SEQ ID NO: 601 - DNA, 20 bp, Arachis hypogaea
  source 1..20: mol_type = other DNA
ggtatttatatagttgcgtt

SEQ ID NO: 602 - DNA, 20 bp, Arachis hypogaea
  source 1..20: mol_type = other DNA
aaatgatggagggaggtgag

SEQ ID NO: 603 - DNA, 20 bp, Arachis hypogaea
  source 1..20: mol_type = other DNA
gatggtgaaatgatggaggg

SEQ ID NO: 604 - DNA, 20 bp, Arachis hypogaea
  source 1..20: mol_type = other DNA
gtggatggtgaaatgatgga

SEQ ID NO: 605 - DNA, 20 bp, Arachis hypogaea
  source 1..20: mol_type = other DNA
tgtggatggtgaaatgatgg

SEQ ID NO: 606 - DNA, 20 bp, Arachis hypogaea
  source 1..20: mol_type = other DNA
gagtgtggatggtgaaatga

SEQ ID NO: 607 - DNA, 20 bp, Arachis hypogaea
  source 1..20: mol_type = other DNA
atgattattatgagtgtgga

SEQ ID NO: 608 - DNA, 20 bp, Arachis hypogaea
  source 1..20: mol_type = other DNA
atatatgattattatgagtg

SEQ ID NO: 609 - DNA, 20 bp, Arachis hypogaea
  source 1..20: mol_type = other DNA
tcatctatataagtagtagc

SEQ ID NO: 610 - DNA, 20 bp, Arachis hypogaea
  source 1..20: mol_type = other DNA
gtagtagcaggagcaatgag

SEQ ID NO: 611 - DNA, 20 bp, Arachis hypogaea
  source 1..20: mol_type = other DNA
tagtagcaggagcaatgaga

SEQ ID NO: 612 - DNA, 20 bp, Arachis hypogaea
  source 1..20: mol_type = other DNA
tagcaggagcaatgagaggg

SEQ ID NO: 613 - DNA, 20 bp, Arachis hypogaea
  source 1..20: mol_type = other DNA
agcaggagcaatgagaggga

SEQ ID NO: 614 - DNA, 20 bp, Arachis hypogaea
  source 1..20: mol_type = other DNA
atccctagcaacagcatcag

SEQ ID NO: 615 - DNA, 20 bp, Arachis hypogaea
  source 1..20: mol_type = other DNA
tctccactgatgctgttgct

SEQ ID NO: 616 - DNA, 20 bp, Arachis hypogaea
  source 1..20: mol_type = other DNA
ctccactgatgctgttgcta

SEQ ID NO: 617 - DNA, 20 bp, Arachis hypogaea
  source 1..20: mol_type = other DNA
gttgctagggatccttgtcc

SEQ ID NO: 618 - DNA, 20 bp, Arachis hypogaea
  source 1..20: mol_type = other DNA
cagaaactgaagccaggaca

SEQ ID NO: 619 - DNA, 20 bp, Arachis hypogaea
  source 1..20: mol_type = other DNA
gcgttgcagaaactgaagcc

SEQ ID NO: 620 - DNA, 20 bp, Arachis hypogaea
  source 1..20: mol_type = other DNA
cttctggtaaggtgatgact

SEQ ID NO: 621 - DNA, 20 bp, Arachis hypogaea
  source 1..20: mol_type = other DNA
ttctctgttttcttctggta

SEQ ID NO: 622 - DNA, 20 bp, Arachis hypogaea
  source 1..20: mol_type = other DNA
aggggttctctgttttcttc

SEQ ID NO: 623 - DNA, 20 bp, Arachis hypogaea
  source 1..20: mol_type = other DNA
ggaggcacctctgggcgcag

SEQ ID NO: 624 - DNA, 20 bp, Arachis hypogaea
  source 1..20: mol_type = other DNA
tggaggcacctctgggcgca

SEQ ID NO: 625 - DNA, 20 bp, Arachis hypogaea
  source 1..20: mol_type = other DNA
ctggaggcacctctgggcgc

SEQ ID NO: 626 - DNA, 20 bp, Arachis hypogaea
  source 1..20: mol_type = other DNA
cagagaacccctgcgcccag

SEQ ID NO: 627 - DNA, 20 bp, Arachis hypogaea
  source 1..20: mol_type = other DNA
acaactctggaggcacctct

SEQ ID NO: 628 - DNA, 20 bp, Arachis hypogaea
  source 1..20: mol_type = other DNA
gacaactctggaggcacctc

SEQ ID NO: 629 - DNA, 20 bp, Arachis hypogaea
  source 1..20: mol_type = other DNA
gttcctgttgacaactctgg

SEQ ID NO: 630 - DNA, 20 bp, Arachis hypogaea
  source 1..20: mol_type = other DNA
ccggttcctgttgacaactc

SEQ ID NO: 631 - DNA, 20 bp, Arachis hypogaea
  source 1..20: mol_type = other DNA
gtgcctccagagttgtcaac

SEQ ID NO: 632 - DNA, 20 bp, Arachis hypogaea
  source 1..20: mol_type = other DNA
ccagagttgtcaacaggaac

SEQ ID NO: 633 - DNA, 20 bp, Arachis hypogaea
  source 1..20: mol_type = other DNA
gccttttgcttcaagtcatc

SEQ ID NO: 634 - DNA, 20 bp, Arachis hypogaea
  source 1..20: mol_type = other DNA
accggatgacttgaagcaaa

SEQ ID NO: 635 - DNA, 20 bp, Arachis hypogaea
  source 1..20: mol_type = other DNA
acgaggatcatactcgagct

SEQ ID NO: 636 - DNA, 20 bp, Arachis hypogaea
  source 1..20: mol_type = other DNA
cgaggatcatagacacaacg

SEQ ID NO: 637 - DNA, 20 bp, Arachis hypogaea
  source 1..20: mol_type = other DNA
cgttgtgtctatgatcctcg

SEQ ID NO: 638 - DNA, 20 bp, Arachis hypogaea
  source 1..20: mol_type = other DNA
gtggtgccagtgtgtcctcg

SEQ ID NO: 639 - DNA, 20 bp, Arachis hypogaea
  source 1..20: mol_type = other DNA
tatgatcctcgaggacacac

SEQ ID NO: 640 - DNA, 20 bp, Arachis hypogaea
  source 1..20: mol_type = other DNA
tggaggggaacgttggttgg

SEQ ID NO: 641 - DNA, 20 bp, Arachis hypogaea
  source 1..20: mol_type = other DNA
ccctggaggggaacgttggt

SEQ ID NO: 642 - DNA, 20 bp, Arachis hypogaea
  source 1..20: mol_type = other DNA
gctcccctggaggggaacgt

SEQ ID NO: 643 - DNA, 20 bp, Arachis hypogaea
  source 1..20: mol_type = other DNA
accaaccaacgttcccctcc

SEQ ID NO: 644 - DNA, 20 bp, Arachis hypogaea
  source 1..20: mol_type = other DNA
ccaaccaacgttcccctcca

SEQ ID NO: 645 - DNA, 20 bp, Arachis hypogaea
  source 1..20: mol_type = other DNA
caaccaacgttcccctccag

SEQ ID NO: 646 - DNA, 20 bp, Arachis hypogaea
  source 1..20: mol_type = other DNA
acgtgtccgctcccctggag

SEQ ID NO: 647 - DNA, 20 bp, Arachis hypogaea
  source 1..20: mol_type = other DNA
cacgtgtccgctcccctgga

SEQ ID NO: 648 - DNA, 20 bp, Arachis hypogaea
  source 1..20: mol_type = other DNA
ccacgtgtccgctcccctgg

SEQ ID NO: 649 - DNA, 20 bp, Arachis hypogaea
  source 1..20: mol_type = other DNA
aacgttcccctccaggggag

SEQ ID NO: 650 - DNA, 20 bp, Arachis hypogaea
  source 1..20: mol_type = other DNA
cggccacgtgtccgctcccc

SEQ ID NO: 651 - DNA, 20 bp, Arachis hypogaea
  source 1..20: mol_type = other DNA
cctccaggggagcggacacg

SEQ ID NO: 652 - DNA, 20 bp, Arachis hypogaea
  source 1..20: mol_type = other DNA
cggacacgtggccgccaacc

SEQ ID NO: 653 - DNA, 20 bp, Arachis hypogaea
  source 1..20: mol_type = other DNA
catcgtagtctccgggttgg

SEQ ID NO: 654 - DNA, 20 bp, Arachis hypogaea
  source 1..20: mol_type = other DNA
catcatcgtagtctccgggt

SEQ ID NO: 655 - DNA, 20 bp, Arachis hypogaea
  source 1..20: mol_type = other DNA
cggtcatcatcgtagtctcc

SEQ ID NO: 656 - DNA, 20 bp, Arachis hypogaea
  source 1..20: mol_type = other DNA
gcggtcatcatcgtagtctc

SEQ ID NO: 657 - DNA, 20 bp, Arachis hypogaea
  source 1..20: mol_type = other DNA
cctctcttcggggttgacgg

SEQ ID NO: 658 - DNA, 20 bp, Arachis hypogaea
  source 1..20: mol_type = other DNA
cttcctctcttcggggttga

SEQ ID NO: 659 - DNA, 20 bp, Arachis hypogaea
  source 1..20: mol_type = other DNA
cggcctccttcctctcttcg

SEQ ID NO: 660 - DNA, 20 bp, Arachis hypogaea
  source 1..20: mol_type = other DNA
ccgccgtcaaccccgaagag

SEQ ID NO: 661 - DNA, 20 bp, Arachis hypogaea
  source 1..20: mol_type = other DNA
tcggcctccttcctctcttc

SEQ ID NO: 662 - DNA, 20 bp, Arachis hypogaea
  source 1..20: mol_type = other DNA
atcggcctccttcctctctt

SEQ ID NO: 663 - DNA, 20 bp, Arachis hypogaea
  source 1..20: mol_type = other DNA
cgtcaaccccgaagagagga

SEQ ID NO: 664 - DNA, 20 bp, Arachis hypogaea
  source 1..20: mol_type = other DNA
caaccccgaagagaggaagg

SEQ ID NO: 665 - DNA, 20 bp, Arachis hypogaea
  source 1..20: mol_type = other DNA
gaagagaggaaggaggccga

SEQ ID NO: 666 - DNA, 20 bp, Arachis hypogaea
  source 1..20: mol_type = other DNA
aagagaggaaggaggccgat

SEQ ID NO: 667 - DNA, 20 bp, Arachis hypogaea
  source 1..20: mol_type = other DNA
agagaggaaggaggccgatg

SEQ ID NO: 668 - DNA, 20 bp, Arachis hypogaea
  source 1..20: mol_type = other DNA
tcggtccagctggtccccat

SEQ ID NO: 669 - DNA, 20 bp, Arachis hypogaea
  source 1..20: mol_type = other DNA
ggaggccgatggggaccagc

SEQ ID NO: 670 - DNA, 20 bp, Arachis hypogaea
  source 1..20: mol_type = other DNA
tcacgctccctcggtccagc

SEQ ID NO: 671 - DNA, 20 bp, Arachis hypogaea
  source 1..20: mol_type = other DNA
gatggggaccagctggaccg

SEQ ID NO: 672 - DNA, 20 bp, Arachis hypogaea
  source 1..20: mol_type = other DNA
atggggaccagctggaccga

SEQ ID NO: 673 - DNA, 20 bp, Arachis hypogaea
  source 1..20: mol_type = other DNA
tcttctctttcacgctccct

SEQ ID NO: 674 - DNA, 20 bp, Arachis hypogaea
  source 1..20: mol_type = other DNA
agcgtgaaagagaagaagac

SEQ ID NO: 675 - DNA, 20 bp, Arachis hypogaea
  source 1..20: mol_type = other DNA
ggtcgcctccaatcttctct

SEQ ID NO: 676 - DNA, 20 bp, Arachis hypogaea
  source 1..20: mol_type = other DNA
ggagacaaccaagagaagat

SEQ ID NO: 677 - DNA, 20 bp, Arachis hypogaea
  source 1..20: mol_type = other DNA
gacaaccaagagaagattgg

SEQ ID NO: 678 - DNA, 20 bp, Arachis hypogaea
  source 1..20: mol_type = other DNA
ttccgtggctgctgatgact

SEQ ID NO: 679 - DNA, 20 bp, Arachis hypogaea
  source 1..20: mol_type = other DNA
gaccaagtcatcagcagcca

SEQ ID NO: 680 - DNA, 20 bp, Arachis hypogaea
  source 1..20: mol_type = other DNA
ccttcgggccttattttccg

SEQ ID NO: 681 - DNA, 20 bp, Arachis hypogaea
  source 1..20: mol_type = other DNA
atcagcagccacggaaaata

SEQ ID NO: 682 - DNA, 20 bp, Arachis hypogaea
  source 1..20: mol_type = other DNA
ccacggaaaataaggcccga

SEQ ID NO: 683 - DNA, 20 bp, Arachis hypogaea
  source 1..20: mol_type = other DNA
tgttctccttctcttccttc

SEQ ID NO: 684 - DNA, 20 bp, Arachis hypogaea
  source 1..20: mol_type = other DNA
ttgttctccttctcttcctt

SEQ ID NO: 685 - DNA, 20 bp, Arachis hypogaea
  source 1..20: mol_type = other DNA
ataaggcccgaaggaagaga

SEQ ID NO: 686 - DNA, 3836 bp, Arachis hypogaea
  source 1..3836: mol_type = genomic DNA
tattttgttttaatttatatattggagatttagttgaataatattaaattaaatttaattaataatattgaatgaatttaaactagatttaatttgataaattttagttgaattatataaaattttaagattttttttttattttttaacgtttaatatccatctgtctcacaaaaggatagagggaaaacgtaaggcaattttctaaataaaaacagagaacggaaaaaggatttccaccatatgaatatcattgccatttctaatgacaatagaggagtttgattgggtaattgatgttgaaaaatggtattaaattaaccgtaaatttaaaaaaaattgactaattttctacggttaaaaatttaaaacattaaaaataatttaaaaaaattaaaaatattaaaataaaaatacatactttatgatttttattaggaaaagtataaggtatcaatatattatttgttaacttattactaacaataattaattattatattttaaatacatatataaagagacacatccagaaaatatatttataaagatacttttattaaatacagccataaaaaagacatttttattagacacattcacaaaaacactttcattaaacacaattattaataagagttggcagaagttgatagaaatactgttgataatgtagcggaattgtttttattattatttaggcattccttaacgcttaagaccaagaaaaaaaaaaaaaaccttaggtgcacaaatctctcaaataagaatttcgggtggcaagatggaaaagcacatcgatgaaggcgttggaagactcatcgttttctcgtggctgaaagtgcgaagtcttcattcttgtatggttgcggaggcgcaagaagctaagatttggaagaatagtggcggataaaatatgattataaatattcaatcaaaatttaaaccacatgttgtatgaagacaaaatcaaccccacaaaagcaggttatccagctctctttgtctatctatatacgtgtgctaaacatagaagtcgcattgccagcacagtttagtttgttttttactcctttattttactctatcttcctcatttccaaggctcttagtgtgtcattcttcagcactatacaacacactatcttttctcctcgtcacactattgtcctatttaattattgaagcactatgtcctcattaccaaaaacatatataggattaggacagaacacattaattatcattttttttaataaaaaatttacattatgtatttaatatggaaatatttttttattaataataatattttgatatatatcctttagctagctaaactcgtttatttttttcccatcgataatttgacaaatcaattaattagaattcgaattttattcaatagtcttctacactaattaataaattactgcatacacaatataaaatttaaactcttaatatctacttaaactaataagttgactagctatacgaccaaaacaagtttaacataaatattacaacccaaggaaacaaactaaaagaaataatgatatttttagtttttttactcatttaatgaattcattgtgaatacatgcataatgagtattgagatacactcatatgtatacgatataggttaaattcatactacaaaaaaaatacccatttaaatatacttaaaaaatatagccaaaaataaaaaaaaacatcttaaattaagactacactttttaaactacaaagacgctttagtgagagatgtctattcgactgttgtctacgaaaacactcataatttattcacttttttctcaaataaaagataaattattttttataatatgtttaatagctatatgttggataaaatagattgttactataatcaaaactaattctttattaaaagaattctctagtaatttttcagccaaatttctttctttaattttatttccaaatgtaagaaagaagaggtaaaacgatattttctgaaaatgaaaatctatataatttataatatcactggctagccacaaaataaaaaaaatgttatttaaaaaaaaacagctgaaacaaaaagataattatgaaatgcagaaatagaaagtgggaacaaaactaaaagcagaataatttttttacaaaacctgcaaatattcacatgactaaagcaaataataatttacaagatgaattaattaaaataaatattctaaaaacaagaagaataacacacacaatattttctatgaagggtaaacaataaaacttagagcgaaaataaaataaatgcagagaaggcagaataagaggacaaatatggagtgaaaaagagaagagaataagtaaaagtaaaatctcaacacgagaggagaagggatgatttggtttctctccggtatgtccagctttattattagggtaattcaaattaaattaagaattagtgttaattatgatgatataattcattttatctaaattattagatactaggaataatttactttttatttaagagaagatgggagtggaaatcaccttaaatttatacatattttcggagaacagattttcaaacatttaaattttttttttttttgtattgatgatatttaatattttttcttattctgaaatggaaaatgctaggtgtaaaaagaaaagaattgattagtcttgattcaaaactaaggaaaaaaacatttatggtttaatttttttttttcttgtaaagtagtagagttaaacatcaaacagaaggtgcattaaacattgaacatctcattgattataccacataacaacatggcatgcttaggtaccaaacaaaaaggcatcttggacagtatttgcatgaaaatgtaacgtggaagcacaaaatcaattaatgaagcaaacacagccaccccaccctccttccccctttcccttttccacgtacctcacatgcaaaatccctcctttcacctataaataccatcaccaccatccacactcaaaaaacaccacacactcttcaatacacattccataaccaccacaacaacaatggccaagctcaccatactagtagccctcgcccttttcctcctcgctgcccacgcatctgcgaggcagcagtgggaactacaaggagacagaagatgccagagccagctcgagagggcgaaccttaggccctgcgagcaacatctcatgcagaaaatccaacgtgacgaggattcatatggacgggacccgtacagccctagtcaggatccgtacagccctagtcaggacccggacagacgtgatccgtacagccctagtccatatgatcggagaggcgctggatcctctcagcaccaagagaggtgttgcaatgagctgaacgagtttgagaacaaccaaaggtgcatgtgcgaggcattgcaacagataatggagaaccagagcgataggttgcaggggaggcaacaggagcaacagttcaagagggagctcaggaacttgcctcaacagtgcggcctcagggcaccacagcgttgcgacttggaagtcgaaagtggcggcagagacagatactaaacacctatctcaaaaaaagaaaagaaaagaaaagaaaatagcttatatataagctattatctatggtaatgttagttttggtaataataaagatcatcactatatgaatgtgttgatcgtgttaactaaggcaagcttaggttatatgagcacctttagagtgcttttatggcgttgtctatgttttgttgctgcagagttgtaaccatcttgaaataatataaaaagatcatgttttgttttggcgagta

SEQ ID NO: 687 - protein, 172 aa, Arachis hypogaea
MAKLTILVALALFLLAAHASARQQWELQGDRRCQSQLERANLRPCEQHLMQKIQRDEDSYGRDPYSPSQDPYSPSQDPDRRDPYSPSPYDRRGAGSSQHQERCCNELNEFENNQRCMCEALQQIMENQSDRLQGRQQEQQFKRELRNLPQQCGLRAPQRCDLEVESGGRDRY

SEQ ID NO: 688 - DNA, 20 bp, Arachis hypogaea
  source 1..20: mol_type = other DNA
ttttgttttaatttatatat

SEQ ID NO: 689 - DNA, 20 bp, Arachis hypogaea
  source 1..20: mol_type = other DNA
ctatccttttgtgagacaga

SEQ ID NO: 690 - DNA, 20 bp, Arachis hypogaea
  source 1..20: mol_type = other DNA
atatccatctgtctcacaaa

SEQ ID NO: 691 - DNA, 20 bp, Arachis hypogaea
  source 1..20: mol_type = other DNA
tctgtctcacaaaaggatag

SEQ ID NO: 692 - DNA, 20 bp, Arachis hypogaea
  source 1..20: mol_type = other DNA
ctgtctcacaaaaggataga

SEQ ID NO: 693 - DNA, 20 bp, Arachis hypogaea
  source 1..20: mol_type = other DNA
aaggatagagggaaaacgta

SEQ ID NO: 694 - DNA, 20 bp, Arachis hypogaea
  source 1..20: mol_type = other DNA
ttctaaataaaaacagagaa

SEQ ID NO: 695 - DNA, 20 bp, Arachis hypogaea
  source 1..20: mol_type = other DNA
taaaaacagagaacggaaaa

SEQ ID NO: 696 - DNA, 20 bp, Arachis hypogaea
  source 1..20: mol_type = other DNA
tggcaatgatattcatatgg

SEQ ID NO: 697 - DNA, 20 bp, Arachis hypogaea
  source 1..20: mol_type = other DNA
aaatggcaatgatattcata

SEQ ID NO: 698 - DNA, 20 bp, Arachis hypogaea
  source 1..20: mol_type = other DNA
tcctctattgtcattagaaa

SEQ ID NO: 699 - DNA, 20 bp, Arachis hypogaea
  source 1..20: mol_type = other DNA
gccatttctaatgacaatag

SEQ ID NO: 700 - DNA, 20 bp, Arachis hypogaea
  source 1..20: mol_type = other DNA
tgacaatagaggagtttgat

SEQ ID NO: 701 - DNA, 20 bp, Arachis hypogaea
  source 1..20: mol_type = other DNA
gacaatagaggagtttgatt

SEQ ID NO: 702 - DNA, 20 bp, Arachis hypogaea
  source 1..20: mol_type = other DNA
gggtaattgatgttgaaaaa

SEQ ID NO: 703 - DNA, 20 bp, Arachis hypogaea
  source 1..20: mol_type = other DNA
gtcaattttttttaaattta

SEQ ID NO: 704 - DNA, 20 bp, Arachis hypogaea
  source 1..20: mol_type = other DNA
aaaaattgactaattttcta

SEQ ID NO: 705 - DNA, 20 bp, Arachis hypogaea
  source 1..20: mol_type = other DNA
catactttatgatttttatt

SEQ ID NO: 706 - DNA, 20 bp, Arachis hypogaea
  source 1..20: mol_type = other DNA
tttttattaggaaaagtata

SEQ ID NO: 707 - DNA, 20 bp, Arachis hypogaea
  source 1..20: mol_type = other DNA
atctttataaatatattttc

SEQ ID NO: 708 - DNA, 20 bp, Arachis hypogaea
  source 1..20: mol_type = other DNA
taataaaaatgtctttttta

SEQ ID NO: 709 - DNA, 20 bp, Arachis hypogaea
  source 1..20: mol_type = other DNA
acacaattattaataagagt

SEQ ID NO: 710 - DNA, 20 bp, Arachis hypogaea
  source 1..20: mol_type = other DNA
aaatactgttgataatgtag

SEQ ID NO: 711 - DNA, 20 bp, Arachis hypogaea
  source 1..20: mol_type = other DNA
aattgtttttattattattt

SEQ ID NO: 712 - DNA, 20 bp, Arachis hypogaea
  source 1..20: mol_type = other DNA
tttcttggtcttaagcgtta

SEQ ID NO: 713 - DNA, 20 bp, Arachis hypogaea
  source 1..20: mol_type = other DNA
aaggttttttttttttttct

SEQ ID NO: 714 - DNA, 20 bp, Arachis hypogaea
  source 1..20: mol_type = other DNA
agaaaaaaaaaaaaaacctt

SEQ ID NO: 715 - DNA, 20 bp, Arachis hypogaea
  source 1..20: mol_type = other DNA
ttgagagatttgtgcaccta

SEQ ID NO: 716 - DNA, 20 bp, Arachis hypogaea
  source 1..20: mol_type = other DNA
aatctctcaaataagaattt

SEQ ID NO: 717 - DNA, 20 bp, Arachis hypogaea
  source 1..20: mol_type = other DNA
atctctcaaataagaatttc

SEQ ID NO: 718 - DNA, 20 bp, Arachis hypogaea
  source 1..20: mol_type = other DNA
tctcaaataagaatttcggg

SEQ ID NO: 719 - DNA, 20 bp, Arachis hypogaea
  source 1..20: mol_type = other DNA
aagaatttcgggtggcaaga

SEQ ID NO: 720 - DNA, 20 bp, Arachis hypogaea
  source 1..20: mol_type = other DNA
atggaaaagcacatcgatga

SEQ ID NO: 721 - DNA, 20 bp, Arachis hypogaea
  source 1..20: mol_type = other DNA
aagcacatcgatgaaggcgt

SEQ ID NO: 722 - DNA, 20 bp, Arachis hypogaea
  source 1..20: mol_type = other DNA
gaagactcatcgttttctcg

SEQ ID NO: 723 - DNA, 20 bp, Arachis hypogaea
  source 1..20: mol_type = other DNA
gcgaagtcttcattcttgta

SEQ ID NO: 724 - DNA, 20 bp, Arachis hypogaea
  source 1..20: mol_type = other DNA
tcttcattcttgtatggttg

SEQ ID NO: 725 - DNA, 20 bp, Arachis hypogaea
  source 1..20: mol_type = other DNA
tcattcttgtatggttgcgg

SEQ ID NO: 726 - DNA, 20 bp, Arachis hypogaea
  source 1..20: mol_type = other DNA
aggcgcaagaagctaagatt

SEQ ID NO: 727 - DNA, 20 bp, Arachis hypogaea
  source 1..20: mol_type = other DNA
gctaagatttggaagaatag

SEQ ID NO: 728 - DNA, 20 bp, Arachis hypogaea
  source 1..20: mol_type = other DNA
aagatttggaagaatagtgg

SEQ ID NO: 729 - DNA, 20 bp, Arachis hypogaea
  source 1..20: mol_type = other DNA
ttttgtcttcatacaacatg

SEQ ID NO: 730 - DNA, 20 bp, Arachis hypogaea
  source 1..20: mol_type = other DNA
ctggataacctgcttttgtg

SEQ ID NO: 731 - DNA, 20 bp, Arachis hypogaea
  source 1..20: mol_type = other DNA
gctggataacctgcttttgt

SEQ ID NO: 732 - DNA, 20 bp, Arachis hypogaea
  source 1..20: mol_type = other DNA
agctggataacctgcttttg

SEQ ID NO: 733 - DNA, 20 bp, Arachis hypogaea
  source 1..20: mol_type = other DNA
aaaatcaaccccacaaaagc

SEQ ID NO: 734 - DNA, 20 bp, Arachis hypogaea
  source 1..20: mol_type = other DNA
tatagatagacaaagagagc

SEQ ID NO: 735 - DNA, 20 bp, Arachis hypogaea
  source 1..20: mol_type = other DNA
aaaaacaaactaaactgtgc

SEQ ID NO: 736 - DNA, 20 bp, Arachis hypogaea
  source 1..20: mol_type = other DNA
aggaagatagagtaaaataa

SEQ ID NO: 737 - DNA, 20 bp, Arachis hypogaea
  source 1..20: mol_type = other DNA
cactaagagccttggaaatg

SEQ ID NO: 738 - DNA, 20 bp, Arachis hypogaea
  source 1..20: mol_type = other DNA
ctctatcttcctcatttcca

SEQ ID NO: 739 - DNA, 20 bp, Arachis hypogaea
  source 1..20: mol_type = other DNA
gaatgacacactaagagcct

SEQ ID NO: 740 - DNA, 20 bp, Arachis hypogaea
  source 1..20: mol_type = other DNA
aataggacaatagtgtgacg

SEQ ID NO: 741 - DNA, 20 bp, Arachis hypogaea
  source 1..20: mol_type = other DNA
tagtgcttcaataattaaat

SEQ ID NO: 742 - DNA, 20 bp, Arachis hypogaea
  source 1..20: mol_type = other DNA
tatatatgtttttggtaatg

SEQ ID NO: 743 - DNA, 20 bp, Arachis hypogaea
  source 1..20: mol_type = other DNA
cctaatcctatatatgtttt

SEQ ID NO: 744 - DNA, 20 bp, Arachis hypogaea
  source 1..20: mol_type = other DNA
tcattaccaaaaacatatat

SEQ ID NO: 745 - DNA, 20 bp, Arachis hypogaea
  source 1..20: mol_type = other DNA
ccaaaaacatatataggatt

SEQ ID NO: 746 - DNA, 20 bp, Arachis hypogaea
  source 1..20: mol_type = other DNA
tttacattatgtatttaata

SEQ ID NO: 747 - DNA, 20 bp, Arachis hypogaea
  source 1..20: mol_type = other DNA
aaacgagtttagctagctaa

SEQ ID NO: 748 - DNA, 20 bp, Arachis hypogaea
  source 1..20: mol_type = other DNA
tgatttgtcaaattatcgat

SEQ ID NO: 749 - DNA, 20 bp, Arachis hypogaea
  source 1..20: mol_type = other DNA
ttgatttgtcaaattatcga

SEQ ID NO: 750 - DNA, 20 bp, Arachis hypogaea
  source 1..20: mol_type = other DNA
tatttatgttaaacttgttt

SEQ ID NO: 751 - DNA, 20 bp, Arachis hypogaea
  source 1..20: mol_type = other DNA
aacataaatattacaaccca

SEQ ID NO: 752 - DNA, 20 bp, Arachis hypogaea
  source 1..20: mol_type = other DNA
ttcttttagtttgtttcctt

SEQ ID NO: 753 - DNA, 20 bp, Arachis hypogaea
  source 1..20: mol_type = other DNA
tttcttttagtttgtttcct

SEQ ID NO: 754 - DNA, 20 bp, Arachis hypogaea
  source 1..20: mol_type = other DNA
cactcatatgtatacgatat

SEQ ID NO: 755 - DNA, 20 bp, Arachis hypogaea
  source 1..20: mol_type = other DNA
ttttttaagtatatttaaat

SEQ ID NO: 756 - DNA, 20 bp, Arachis hypogaea
  source 1..20: mol_type = other DNA
attttttaagtatatttaaa

SEQ ID NO: 757 - DNA, 20 bp, Arachis hypogaea
  source 1..20: mol_type = other DNA
aagatgtttttttttatttt

SEQ ID NO: 758 - DNA, 20 bp, Arachis hypogaea
  source 1..20: mol_type = other DNA
tatgtttaatagctatatgt

SEQ ID NO: 759 - DNA, 20 bp, Arachis hypogaea
  source 1..20: mol_type = other DNA
taaaattaaagaaagaaatt

SEQ ID NO: 760 - DNA, 20 bp, Arachis hypogaea
  source 1..20: mol_type = other DNA
tacctcttctttcttacatt

SEQ ID NO: 761 - DNA, 20 bp, Arachis hypogaea
  source 1..20: mol_type = other DNA
ttccaaatgtaagaaagaag

SEQ ID NO: 762 - DNA, 20 bp, Arachis hypogaea
  source 1..20: mol_type = other DNA
tatataatttataatatcac

SEQ ID NO: 763 - DNA, 20 bp, Arachis hypogaea
  source 1..20: mol_type = other DNA
ataacattttttttattttg

SEQ ID NO: 764 - DNA, 20 bp, Arachis hypogaea
  source 1..20: mol_type = other DNA
tgaaatgcagaaatagaaag

SEQ ID NO: 765 - DNA, 20 bp, Arachis hypogaea
  source 1..20: mol_type = other DNA
gaaatgcagaaatagaaagt

SEQ ID NO: 766 - DNA, 20 bp, Arachis hypogaea
  source 1..20: mol_type = other DNA
ttagtcatgtgaatatttgc

SEQ ID NO: 767 - DNA, 20 bp, Arachis hypogaea
  source 1..20: mol_type = other DNA
acacacaatattttctatga

SEQ ID NO: 768 - DNA, 20 bp, Arachis hypogaea
  source 1..20: mol_type = other DNA
cacacaatattttctatgaa

SEQ ID NO: 769 - DNA, 20 bp, Arachis hypogaea
  source 1..20: mol_type = other DNA
aaataaaataaatgcagaga

SEQ ID NO: 770 - DNA, 20 bp, Arachis hypogaea
  source 1..20: mol_type = other DNA
tgcagagaaggcagaataag

SEQ ID NO: 771 - DNA, 20 bp, Arachis hypogaea
  source 1..20: mol_type = other DNA
gcagaataagaggacaaata

SEQ ID NO: 772 - DNA, 20 bp, Arachis hypogaea
  source 1..20: mol_type = other DNA
aagtaaaatctcaacacgag

SEQ ID NO: 773 - DNA, 20 bp, Arachis hypogaea
  source 1..20: mol_type = other DNA
aatctcaacacgagaggaga

SEQ ID NO: 774 - DNA, 20 bp, Arachis hypogaea
  source 1..20: mol_type = other DNA
atctcaacacgagaggagaa

SEQ ID NO: 775 - DNA, 20 bp, Arachis hypogaea
  source 1..20: mol_type = other DNA
cgagaggagaagggatgatt

SEQ ID NO: 776 - DNA, 20 bp, Arachis hypogaea
  source 1..20: mol_type = other DNA
gggatgatttggtttctctc

SEQ ID NO: 777 - DNA, 20 bp, Arachis hypogaea
  source 1..20: mol_type = other DNA
aataataaagctggacatac

SEQ ID NO: 778 - DNA, 20 bp, Arachis hypogaea
  source 1..20: mol_type = other DNA
aattaccctaataataaagc

SEQ ID NO: 779 - DNA, 20 bp, Arachis hypogaea
  source 1..20: mol_type = other DNA
gtatgtccagctttattatt

SEQ ID NO: 780 - DNA, 20 bp, Arachis hypogaea
  source 1..20: mol_type = other DNA
tatgtccagctttattatta

SEQ ID NO: 781 - DNA, 20 bp, Arachis hypogaea
  source 1..20: mol_type = other DNA
tatctaaattattagatact

SEQ ID NO: 782 - DNA, 20 bp, Arachis hypogaea
  source 1..20: mol_type = other DNA
actttttatttaagagaaga

SEQ ID NO: 783 - DNA, 20 bp, Arachis hypogaea
  source 1..20: mol_type = other DNA
ctttttatttaagagaagat

SEQ ID NO: 784 - DNA, 20 bp, Arachis hypogaea
  source 1..20: mol_type = other DNA
tatttaagagaagatgggag

SEQ ID NO: 785 - DNA, 20 bp, Arachis hypogaea
  source 1..20: mol_type = other DNA
cgaaaatatgtataaattta

SEQ ID NO: 786 - DNA, 20 bp, Arachis hypogaea
  source 1..20: mol_type = other DNA
cttaaatttatacatatttt

SEQ ID NO: 787 - DNA, 20 bp, Arachis hypogaea
  source 1..20: mol_type = other DNA
tattttttcttattctgaaa

SEQ ID NO: 788 - DNA, 20 bp, Arachis hypogaea
  source 1..20: mol_type = other DNA
attctgaaatggaaaatgct

SEQ ID NO: 789 - DNA, 20 bp, Arachis hypogaea
  source 1..20: mol_type = other DNA
ttagtcttgattcaaaacta

SEQ ID NO: 790 - DNA, 20 bp, Arachis hypogaea
  source 1..20: mol_type = other DNA
actaaggaaaaaaacattta

SEQ ID NO: 791 - DNA, 20 bp, Arachis hypogaea
  source 1..20: mol_type = other DNA
agagttaaacatcaaacaga

SEQ ID NO: 792 - DNA, 20 bp, Arachis hypogaea
  source 1..20: mol_type = other DNA
aagcatgccatgttgttatg

SEQ ID NO: 793 - DNA, 20 bp, Arachis hypogaea
  source 1..20: mol_type = other DNA
gattataccacataacaaca

SEQ ID NO: 794 - DNA, 20 bp, Arachis hypogaea
  source 1..20: mol_type = other DNA
cataacaacatggcatgctt

SEQ ID NO: 795 - DNA, 20 bp, Arachis hypogaea
  source 1..20: mol_type = other DNA
gtccaagatgcctttttgtt

SEQ ID NO: 796 - DNA, 20 bp, Arachis hypogaea
  source 1..20: mol_type = other DNA
tgcttaggtaccaaacaaaa

SEQ ID NO: 797 - DNA, 20 bp, Arachis hypogaea
  source 1..20: mol_type = other DNA
taccaaacaaaaaggcatct

SEQ ID NO: 798 - DNA, 20 bp, Arachis hypogaea
  source 1..20: mol_type = other DNA
atttgcatgaaaatgtaacg

SEQ ID NO: 799 - DNA, 20 bp, Arachis hypogaea
  source 1..20: mol_type = other DNA
aagggggaaggagggtgggg

SEQ ID NO: 800 - DNA, 20 bp, Arachis hypogaea
  source 1..20: mol_type = other DNA
ggaaagggggaaggagggtg

SEQ ID NO: 801 - DNA, 20 bp, Arachis hypogaea
  source 1..20: mol_type = other DNA
gggaaagggggaaggagggt

SEQ ID NO: 802 - DNA, 20 bp, Arachis hypogaea
  source 1..20: mol_type = other DNA
agggaaagggggaaggaggg

SEQ ID NO: 803 - DNA, 20 bp, Arachis hypogaea
  source 1..20: mol_type = other DNA
aaaagggaaagggggaagga

SEQ ID NO: 804 - DNA, 20 bp, Arachis hypogaea
  source 1..20: mol_type = other DNA
gaaaagggaaagggggaagg

SEQ ID NO: 805 - DNA, 20 bp, Arachis hypogaea
  source 1..20: mol_type = other DNA
gtggaaaagggaaaggggga

SEQ ID NO: 806 - DNA, 20 bp, Arachis hypogaea
  source 1..20: mol_type = other DNA
gtacgtggaaaagggaaagg

SEQ ID NO: 807 - DNA, 20 bp, Arachis hypogaea
  source 1..20: mol_type = other DNA
ggtacgtggaaaagggaaag

SEQ ID NO: 808 - DNA, 20 bp, Arachis hypogaea
  source 1..20: mol_type = other DNA
aggtacgtggaaaagggaaa

SEQ ID NO: 809 - DNA, 20 bp, Arachis hypogaea
  source 1..20: mol_type = other DNA
gaggtacgtggaaaagggaa

SEQ ID NO: 810 - DNA, 20 bp, Arachis hypogaea
  source 1..20: mol_type = other DNA
catgtgaggtacgtggaaaa

SEQ ID NO: 811 - DNA, 20 bp, Arachis hypogaea
  source 1..20: mol_type = other DNA
gcatgtgaggtacgtggaaa

SEQ ID NO: 812 - DNA, 20 bp, Arachis hypogaea
  source 1..20: mol_type = other DNA
gattttgcatgtgaggtacg

SEQ ID NO: 813 - DNA, 20 bp, Arachis hypogaea
  source 1..20: mol_type = other DNA
aaggagggattttgcatgtg

SEQ ID NO: 814 - DNA, 20 bp, Arachis hypogaea
  source 1..20: mol_type = other DNA
ggtatttataggtgaaagga

SEQ ID NO: 815 - DNA, 20 bp, Arachis hypogaea
  source 1..20: mol_type = other DNA
tggtatttataggtgaaagg

SEQ ID NO: 816 - DNA, 20 bp, Arachis hypogaea
  source 1..20: mol_type = other DNA
tgatggtatttataggtgaa

SEQ ID NO: 817 - DNA, 20 bp, Arachis hypogaea
  source 1..20: mol_type = other DNA
atggtggtgatggtatttat

SEQ ID NO: 818 - DNA, 20 bp, Arachis hypogaea
  source 1..20: mol_type = other DNA
ttgagtgtggatggtggtga

SEQ ID NO: 819 - DNA, 20 bp, Arachis hypogaea
  source 1..20: mol_type = other DNA
tgttttttgagtgtggatgg

SEQ ID NO: 820 - DNA, 20 bp, Arachis hypogaea
  source 1..20: mol_type = other DNA
tggtgttttttgagtgtgga

SEQ ID NO: 821 - DNA, 20 bp, Arachis hypogaea
  source 1..20: mol_type = other DNA
tgtgtggtgttttttgagtg

SEQ ID NO: 822 - DNA, 20 bp, Arachis hypogaea
  source 1..20: mol_type = other DNA
aatgtgtattgaagagtgtg

SEQ ID NO: 823 - DNA, 20 bp, Arachis hypogaea
  source 1..20: mol_type = other DNA
cattgttgttgtggtggtta

SEQ ID NO: 824 - DNA, 20 bp, Arachis hypogaea
  source 1..20: mol_type = other DNA
cttggccattgttgttgtgg

SEQ ID NO: 825 - DNA, 20 bp, Arachis hypogaea
  source 1..20: mol_type = other DNA
gagcttggccattgttgttg

SEQ ID NO: 826 - DNA, 20 bp, Arachis hypogaea
  source 1..20: mol_type = other DNA
cataaccaccacaacaacaa

SEQ ID NO: 827 - DNA, 20 bp, Arachis hypogaea
  source 1..20: mol_type = other DNA
ggctactagtatggtgagct

SEQ ID NO: 828 - DNA, 20 bp, Arachis hypogaea
  source 1..20: mol_type = other DNA
aagggcgagggctactagta

SEQ ID NO: 829 - DNA, 20 bp, Arachis hypogaea
  source 1..20: mol_type = other DNA
agcgaggaggaaaagggcga

SEQ ID NO: 830 - DNA, 20 bp, Arachis hypogaea
  source 1..20: mol_type = other DNA
cagcgaggaggaaaagggcg

SEQ ID NO: 831 - DNA, 20 bp, Arachis hypogaea
  source 1..20: mol_type = other DNA
gtgggcagcgaggaggaaaa

SEQ ID NO: 832 - DNA, 20 bp, Arachis hypogaea
  source 1..20: mol_type = other DNA
cgtgggcagcgaggaggaaa

SEQ ID NO: 833 - DNA, 20 bp, Arachis hypogaea
  source 1..20: mol_type = other DNA
cagatgcgtgggcagcgagg

SEQ ID NO: 834 - DNA, 20 bp, Arachis hypogaea
  source 1..20: mol_type = other DNA
tcgcagatgcgtgggcagcg

SEQ ID NO: 835 - DNA, 20 bp, Arachis hypogaea
  source 1..20: mol_type = other DNA
ctgctgcctcgcagatgcgt

SEQ ID NO: 836 - DNA, 20 bp, Arachis hypogaea
  source 1..20: mol_type = other DNA
actgctgcctcgcagatgcg

SEQ ID NO: 837 - DNA, 20 bp, Arachis hypogaea
  source 1..20: mol_type = other DNA
tcgctgcccacgcatctgcg

SEQ ID NO: 838 - DNA, 20 bp, Arachis hypogaea
  source 1..20: mol_type = other DNA
acgcatctgcgaggcagcag

SEQ ID NO: 839 - DNA, 20 bp, Arachis hypogaea
  source 1..20: mol_type = other DNA
cgcatctgcgaggcagcagt

SEQ ID NO: 840 - DNA, 20 bp, Arachis hypogaea
  source 1..20: mol_type = other DNA
aggcagcagtgggaactaca

SEQ ID NO: 841 - DNA, 20 bp, Arachis hypogaea
  source 1..20: mol_type = other DNA
tcgccctctcgagctggctc

SEQ ID NO: 842 - DNA, 20 bp, Arachis hypogaea
  source 1..20: mol_type = other DNA
taaggttcgccctctcgagc

SEQ ID NO: 843 - DNA, 20 bp, Arachis hypogaea
  source 1..20: mol_type = other DNA
gatgccagagccagctcgag

SEQ ID NO: 844 - DNA, 20 bp, Arachis hypogaea
  source 1..20: mol_type = other DNA
atgccagagccagctcgaga

SEQ ID NO: 845 - DNA, 20 bp, Arachis hypogaea
  source 1..20: mol_type = other DNA
agctcgagagggcgaacctt

SEQ ID NO: 846 - DNA, 20 bp, Arachis hypogaea
  source 1..20: mol_type = other DNA
gatgttgctcgcagggccta

SEQ ID NO: 847 - DNA, 20 bp, Arachis hypogaea
  source 1..20: mol_type = other DNA
tgcatgagatgttgctcgca

SEQ ID NO: 848 - DNA, 20 bp, Arachis hypogaea
  source 1..20: mol_type = other DNA
ctgcatgagatgttgctcgc

SEQ ID NO: 849 - DNA, 20 bp, Arachis hypogaea
  source 1..20: mol_type = other DNA
catatgaatcctcgtcacgt

SEQ ID NO: 850 - DNA, 20 bp, Arachis hypogaea
  source 1..20: mol_type = other DNA
gcagaaaatccaacgtgacg

SEQ ID NO: 851 - DNA, 20 bp, Arachis hypogaea
  source 1..20: mol_type = other DNA
caacgtgacgaggattcata

SEQ ID NO: 852 - DNA, 20 bp, Arachis hypogaea
  source 1..20: mol_type = other DNA
gtgacgaggattcatatgga

SEQ ID NO: 853 - DNA, 20 bp, Arachis hypogaea
  source 1..20: mol_type = other DNA
tgacgaggattcatatggac

SEQ ID NO: 854 - DNA, 20 bp, Arachis hypogaea
  source 1..20: mol_type = other DNA
gatcctgactagggctgtac

SEQ ID NO: 855 - DNA, 20 bp, Arachis hypogaea
  source 1..20: mol_type = other DNA
ggatcctgactagggctgta

SEQ ID NO: 856 - DNA, 20 bp, Arachis hypogaea
  source 1..20: mol_type = other DNA
ggacccgtacagccctagtc

SEQ ID NO: 857 - DNA, 20 bp, Arachis hypogaea
  source 1..20: mol_type = other DNA
ggctgtacggatcctgacta

SEQ ID NO: 858 - DNA, 20 bp, Arachis hypogaea
  source 1..20: mol_type = other DNA
gggctgtacggatcctgact

SEQ ID NO: 859 - DNA, 20 bp, Arachis hypogaea
  source 1..20: mol_type = other DNA
gggtcctgactagggctgta

SEQ ID NO: 860 - DNA, 20 bp, Arachis hypogaea
  source 1..20: mol_type = other DNA
ggatccgtacagccctagtc

SEQ ID NO: 861 - DNA, 20 bp, Arachis hypogaea
  source 1..20: mol_type = other DNA
gtctgtccgggtcctgacta

SEQ ID NO: 862 - DNA, 20 bp, Arachis hypogaea
  source 1..20: mol_type = other DNA
cgtctgtccgggtcctgact

SEQ ID NO: 863 - DNA, 20 bp, Arachis hypogaea
  source 1..20: mol_type = other DNA
gtacagccctagtcaggacc

SEQ ID NO: 864 - DNA, 20 bp, Arachis hypogaea
  source 1..20: mol_type = other DNA
tgtacggatcacgtctgtcc

SEQ ID NO: 865 - DNA, 20 bp, Arachis hypogaea
  source 1..20: mol_type = other DNA
ctgtacggatcacgtctgtc

SEQ ID NO: 866 - DNA, 20 bp, Arachis hypogaea
  source 1..20: mol_type = other DNA
tcatatggactagggctgta

SEQ ID NO: 867 - DNA, 20 bp, Arachis hypogaea
  source 1..20: mol_type = other DNA
ctctccgatcatatggacta

SEQ ID NO: 868 - DNA, 20 bp, Arachis hypogaea
  source 1..20: mol_type = other DNA
cctctccgatcatatggact

SEQ ID NO: 869 - DNA, 20 bp, Arachis hypogaea
  source 1..20: mol_type = other DNA
acagccctagtccatatgat

SEQ ID NO: 870 - DNA, 20 bp, Arachis hypogaea
  source 1..20: mol_type = other DNA
ccagcgcctctccgatcata

SEQ ID NO: 871 - DNA, 20 bp, Arachis hypogaea
  source 1..20: mol_type = other DNA
cctagtccatatgatcggag

SEQ ID NO: 872 - DNA, 20 bp, Arachis hypogaea
  source 1..20: mol_type = other DNA
ccatatgatcggagaggcgc

SEQ ID NO: 873 - DNA, 20 bp, Arachis hypogaea
  source 1..20: mol_type = other DNA
acacctctcttggtgctgag

SEQ ID NO: 874 - DNA, 20 bp, Arachis hypogaea
  source 1..20: mol_type = other DNA
gatcctctcagcaccaagag

SEQ ID NO: 875 - DNA, 20 bp, Arachis hypogaea
  source 1..20: mol_type = other DNA
gctcattgcaacacctctct

SEQ ID NO: 876 - DNA, 20 bp, Arachis hypogaea
  source 1..20: mol_type = other DNA
acgagtttgagaacaaccaa

SEQ ID NO: 877 - DNA, 20 bp, Arachis hypogaea
  source 1..20: mol_type = other DNA
atgcctcgcacatgcacctt

SEQ ID NO: 878 - DNA, 20 bp, Arachis hypogaea
  source 1..20: mol_type = other DNA
caaccaaaggtgcatgtgcg

SEQ ID NO: 879 - DNA, 20 bp, Arachis hypogaea
  source 1..20: mol_type = other DNA
cgaggcattgcaacagataa

SEQ ID NO: 880 - DNA, 20 bp, Arachis hypogaea
  source 1..20: mol_type = other DNA
tcccctgcaacctatcgctc

SEQ ID NO: 881 - DNA, 20 bp, Arachis hypogaea
  source 1..20: mol_type = other DNA
taatggagaaccagagcgat

SEQ ID NO: 882 - DNA, 20 bp, Arachis hypogaea
  source 1..20: mol_type = other DNA
gaaccagagcgataggttgc

SEQ ID NO: 883 - DNA, 20 bp, Arachis hypogaea
  source 1..20: mol_type = other DNA
aaccagagcgataggttgca

SEQ ID NO: 884 - DNA, 20 bp, Arachis hypogaea
  source 1..20: mol_type = other DNA
accagagcgataggttgcag

SEQ ID NO: 885 - DNA, 20 bp, Arachis hypogaea
  source 1..20: mol_type = other DNA
agagcgataggttgcagggg

SEQ ID NO: 886 - DNA, 20 bp, Arachis hypogaea
  source 1..20: mol_type = other DNA
taggttgcaggggaggcaac

SEQ ID NO: 887 - DNA, 20 bp, Arachis hypogaea
  source 1..20: mol_type = other DNA
aacaggagcaacagttcaag

SEQ ID NO: 888 - DNA, 20 bp, Arachis hypogaea
  source 1..20: mol_type = other DNA
acaggagcaacagttcaaga

SEQ ID NO: 889 - DNA, 20 bp, Arachis hypogaea
  source 1..20: mol_type = other DNA
aacagttcaagagggagctc

SEQ ID NO: 890 - DNA, 20 bp, Arachis hypogaea
  source 1..20: mol_type = other DNA
gccctgaggccgcactgttg

SEQ ID NO: 891 - DNA, 20 bp, Arachis hypogaea
  source 1..20: mol_type = other DNA
aggaacttgcctcaacagtg

SEQ ID NO: 892 - DNA, 20 bp, Arachis hypogaea
  source 1..20: mol_type = other DNA
tgcctcaacagtgcggcctc

SEQ ID NO: 893 - DNA, 20 bp, Arachis hypogaea
  source 1..20: mol_type = other DNA
gcctcaacagtgcggcctca

SEQ ID NO: 894 - DNA, 20 bp, Arachis hypogaea
  source 1..20: mol_type = other DNA
cgcaacgctgtggtgccctg

SEQ ID NO: 895 - DNA, 20 bp, Arachis hypogaea
  source 1..20: mol_type = other DNA
acttccaagtcgcaacgctg

SEQ ID NO: 896 - DNA, 20 bp, Arachis hypogaea
  source 1..20: mol_type = other DNA
ggcaccacagcgttgcgact

SEQ ID NO: 897 - DNA, 20 bp, Arachis hypogaea
  source 1..20: mol_type = other DNA
tgcgacttggaagtcgaaag

SEQ ID NO: 898 - DNA, 20 bp, Arachis hypogaea
  source 1..20: mol_type = other DNA
gacttggaagtcgaaagtgg

SEQ ID NO: 899 - DNA, 20 bp, Arachis hypogaea
  source 1..20: mol_type = other DNA
ttcttttctttttttgagat

SEQ ID NO: 900 - DNA, 20 bp, Arachis hypogaea
  source 1..20: mol_type = other DNA
tatatataagctattatcta

SEQ ID NO: 901 - DNA, 20 bp, Arachis hypogaea
  source 1..20: mol_type = other DNA
atctatggtaatgttagttt

SEQ ID NO: 902 - DNA, 20 bp, Arachis hypogaea
  source 1..20: mol_type = other DNA
tgtgttgatcgtgttaacta

SEQ ID NO: 903 - DNA, 20 bp, Arachis hypogaea
  source 1..20: mol_type = other DNA
gtgttaactaaggcaagctt

SEQ ID NO: 904 - DNA, 20 bp, Arachis hypogaea
  source 1..20: mol_type = other DNA
acgccataaaagcactctaa

SEQ ID NO: 905 - DNA, 20 bp, Arachis hypogaea
  source 1..20: mol_type = other DNA
gcacctttagagtgctttta

SEQ ID NO: 906 - DNA, 20 bp, Arachis hypogaea
  source 1..20: mol_type = other DNA
ctttttatattatttcaaga

SEQ ID NO: 907 - DNA, 20 bp, Arachis hypogaea
  source 1..20: mol_type = other DNA
aaaaagatcatgttttgttt

SEQ ID NO: 908 - DNA, 5169 bp, Arachis hypogaea
  source 1..5169: mol_type = genomic DNA
gagtaattttttttgagttgtgctacatgtacaccaaaatcaaccactaaaatcagtcacgagtataaaatacatgctaaaataataaaatataaatacatatatacacatatattttgttgagcctaatttgattttgggttaatttatgatgacaaacattcaattgggttgaaagcccaatattatttaatgtgtgttttattgtggcaggcccatgaattctctcacagccaaacaatgctacatgttcattcatttgatgtttcaagtaaatacacaagtccaatacctcactcttgtttcaccgttcagcaagaatgaaaggctatacgtttggcaaaagaaaaagagcagctatctatatcatgagcaaaataggacaactggaaaacaaaggaagcaacaacacaacaagaacaggtgtggctctgtaaaagcaagaaaggacactaggataaccactaatccaaggacatcagctgagcaatactaggatcgtagttgaacaaaacacaaacaagcaaagagcacagagcagcagcagcaagaaaatggagcagaatgcaaaagaagagcatgccaaggaagaaggtcaagcaaaggacagcagaggtagtagtcgagctcctcaagcagcagaggtagtggagcatggtgaaaaaggactactgccagctatgacagctccaacgagtagctggtacaaggaaatgaaagaggcaacaaagaagccaagttgaagatatataagaagcttcactccaccatttcaaaaacaaaaaagagagaacacacacacactcagagcaccatctctaacacagagctggaatctctttcttctactcaagcttaattctgatttttatgttatggctgtcttgcgttgttttctgttttgagaaaaggcaattatgcgaggttcaaaagtcaagagagaaaaggcaagagtgatgcaaaatagccactaatttctgatgtattttgggtttatgaattaggattaatttcccttaccaagttgggttagcacttgggaaaattgaatctggttgattcccactactagttgggtcagcactatgggaagctaaacttttggtgatgaaagcttagggggtagatactagttgaattaggaaaaaattcaatactattggtgtatgtaatctgtgaatgattagtgaaaattccaccatagtttgtggtggagactggatgtaggattcatggtataaaaaatccgaaccaagatacatgctggtcttcattttctcttccctgctcttttatgttctgcgtatgagataatttcaaataatctcctgcaacttgaaagcaacagattaacagagtctgaaattttaaattttaagccaacttgattcaacccccttctcaagttcaactagaaccatcatatttatacataaatacattagtggctgattttagtataaaaataatatttttttatatgttgagtaatgcatgtctgtagactatttttttatatgtactgttaagagtgatttatttaatattataataatattttgtgtaatatattgatataagatacttagggtcggaagaaattattagtaacaatttcataatgttatttaaaacccgtaactagcgattttttttagttttgatgaaaattaaataaaatttgtaaataaaaaattattatttgtacccataaaagatataaacgctaataaatgcatctatataaaaataaaacgacgattataattatggaagatggcttctgtgtgtcaagaatatctttacagatcaattgcgtaatgaatgtccgatatttttgacatacagaggccatctttcgtggttacaattgtcgttttattcttatatgagtaaatttgtccgcgtctatatttttcatgtgtacaaatgataatttattcaaaattttaaatattataaaagcgttgatcacaatttataagtgctaataataatagcccttcctgatgcctatgtactttttatttttaatattggagtagtagtggtgcgttttttaaaatgtggattggttaggtgttatactcaaatgtagaatagtttaactggagaagtagaaatcggacggtccaatttattagagatacagaaattgaaccgtccgatttttagaagtacacaaatcggactgtttgatttatgagaggtacacaaatcgaatccgatttgtgttaaaaaaaatttaaaaaatttgaaatagagaaatcggaccctccgatttgtttattttcacagttttaaaaaatacaaaaagttacaatattaaaatatatcatcacttttacttccataacacaaaaaattaaccgatgtttattacctaacattaagaataataaaaatattagtatgataacaaaaatatatatcatattattctaaaataagatatatcatattctataataattactaataataatatctaaaatatgcaaataataatacaaataataacaattaaaataatttttaataataataacaataccatcacacttaaaagatgaaaacttaagtgaagtcgacctcacataaaattgatatctgagagtcgttctatgaaaatttagtaaaatcatctaacgggctctcaaatatcaattttataggaagtcgactgtaccgcccactcataaacattaaacaatgtatctaaccggagaattaggcatgagcaagaaaagagaagaactgaagccgtgcatgcgtggtccccgttgtgaagaaatcgcagataaatgcttagctgtgcatggagacaaggttgctctctttgtatgcttatcatgttatagagatgctttgcgaggtgtaacaaaggaagggtgccatagccatgcatgctgaagagtgtcccaattgctcagtctaccaactcactttctccgacgtgtcccttccttcaccctcctctcgccccctataaatcacgtcgcttctcattctcctcttcatcacaaccacaccaataacaataatagcagccatggctaagcttcttgcgctttctttttgcttttgctttctagttctgggagctagcagcatctccttcaggcagcagccggaggagaatgcgtgccagttccagcgcctcaatgcgcagagacctgacaatcgcattgaatcagagggcggttacattgagacttggaaccccaacaaccaggagttcgaatgcgccggcgtcgccctctctcgcttagtcctccgccgcaacgcccttcgtaggcctttctactccaatgctccccaggagatcttcatccagcaaggttattacttattactactttttcatatttgagaattttattttattttttccatgatctttgtttgttaatttcattttgaatgaacacatacaggaaggggatactttgggttgatattccctggttgtcctagcacatatgaagagcctgcacaacaaggacgtcgatctcagtcccaaagaccaccaagacgtcttcaaggagaagaccaaagccaacagcaacaagatagtcaccagaaggtgcaccgtttcgatgagggtgatctcattgcagttcccaccggtgttgctttctggctctacaacgaccacgacactgatgttgttgctgtttctcttactgacaccaacaacaacgacaaccagcttgatcagttccccagggtatatatattccttatttttggcatctgcatatatatcatgaatattgagtcatttcttagaacttgtcatcactaaagcaatcaacatttaataatacataacagagattcaatttggctgggaaccacgagcaagagttcttaaggtaccagcaacaaagcagacaaagcagacgaagaagcttaccatatagcccatacagcccgcaaagtcagcctagacaagaagagcgtgaatttagccctcgaggacagcacagccgcagagaacgagcaggacaagaagaagaaaacgaaggtggaaacatcttcagcggcttcacgccggagttcctggaacaagccttccaggttgacgacagacagatagtgcaaaacctaagaggcgagaacgagagtgaagaagagggagccattgtgacagtgaggggaggcctcagaatcttgagcccagatagaaagagacgtgccgacgaagaagaggaatacgatgaagatgaatatgaatacgatgaagaggatagaaggcgtggcaggggaagcagaggcagggggaatggtattgaagagacgatctgcaccgcaagtgttaaaaagaacattggtagaaacagatcccctgacatctacaaccctcaagctggttcactcaaaactgccaacgatctcaaccttctaatacttaggtggcttggacttagtgctgaatatggaaatctctacagggtttgtactttctctttttctatctctttttttaccaatatatactagacatttatttacatattgaaatgtgattgcagaatgcattgtttgtccctcactacaacaccaacgcacacagcatcatatatgcattgaggggacgggctcacgtgcaagtcgtggacagcaacggcaacagagtgtacgacgaggagcttcaagagggtcacgtgcttgtggtgccacagaacttcgccgtcgctggaaagtcccagagcgagaacttcgaatacgtggcattcaagacagactcaaggcccagcatagccaacctcgccggtgaaaactccgtcatagataacctgccggaggaggtggttgcaaattcatatggcctcccaagggagcaggcaaggcagcttaagaacaacaaccccttcaagttcttcgttccaccgtctcagcagtctccgagggctgtggcttaaaaacgaccagtatcttctgcaagcgtgttatccactacatactttttgccacaaatgaataatataataataagaagaataatgtagttttaatttttagtatgaataagaatacaaaggggcattgatgccttttttgtttaagatcggaatgtaacatatgtgcaatgagcagatatggagaaaaccttttgcgggaaaaacatgaataataaaagaagttatggtctcacgcacgcca

SEQ ID NO: 909 - protein, 530 aa, Arachis hypogaea
MAKLLALSFCFCFLVLGASSISFRQQPEENACQFQRLNAQRPDNRIESEGGYIETWNPNNQEFECAGVALSRLVLRRNALRRPFYSNAPQEIFIQQGRGYFGLIFPGCPSTYEEPAQQGRRSQSQRPPRRLQGEDQSQQQQDSHQKVHRFDEGDLIAVPTGVAFWLYNDHDTDVVAVSLTDTNNNDNQLDQFPRRFNLAGNHEQEFLRYQQQSRQSRRRSLPYSPYSPQSQPRQEEREFSPRGQHSRRERAGQEEENEGGNIFSGFTPEFLEQAFQVDDRQIVQNLRGENESEEEGAIVTVRGGLRILSPDRKRRADEEEEYDEDEYEYDEEDRRRGRGSRGRGNGIEETICTASVKKNIGRNRSPDIYNPQAGSLKTANDLNLLILRWLGLSAEYGNLYRNALFVPHYNTNAHSIIYALRGRAHVQVVDSNGNRVYDEELQEGHVLVVPQNFAVAGKSQSENFEYVAFKTDSRPSIANLAGENSVIDNLPEEVVANSYGLPREQARQLKNNNPFKFFVPPSQQSPRAVA

SEQ ID NO: 910 - DNA, 20 bp, Arachis hypogaea
  source 1..20: mol_type = other DNA
ctgattttagtggttgattt

SEQ ID NO: 911 - DNA, 20 bp, Arachis hypogaea
  source 1..20: mol_type = other DNA
atactcgtgactgattttag

SEQ ID NO: 912 - DNA, 20 bp, Arachis hypogaea
  source 1..20: mol_type = other DNA
aattaacccaaaatcaaatt

SEQ ID NO: 913 - DNA, 20 bp, Arachis hypogaea
  source 1..20: mol_type = other DNA
tgttgagcctaatttgattt

SEQ ID NO: 914 - DNA, 20 bp, Arachis hypogaea
  source 1..20: mol_type = other DNA
gttgagcctaatttgatttt

SEQ ID NO: 915 - DNA, 20 bp, Arachis hypogaea
  source 1..20: mol_type = other DNA
tatgatgacaaacattcaat

SEQ ID NO: 916 - DNA, 20 bp, Arachis hypogaea
  source 1..20: mol_type = other DNA
atgatgacaaacattcaatt

SEQ ID NO: 917 - DNA, 20 bp, Arachis hypogaea
  source 1..20: mol_type = other DNA
aacacacattaaataatatt

SEQ ID NO: 918 - DNA, 20 bp, Arachis hypogaea
  source 1..20: mol_type = other DNA
aaacacacattaaataatat

SEQ ID NO: 919 - DNA, 20 bp, Arachis hypogaea
  source 1..20: mol_type = other DNA
atttaatgtgtgttttattg

SEQ ID NO: 920 - DNA, 20 bp, Arachis hypogaea
  source 1..20: mol_type = other DNA
aatgtgtgttttattgtggc

SEQ ID NO: 921 - DNA, 20 bp, Arachis hypogaea
  source 1..20: mol_type = other DNA
ttggctgtgagagaattcat

SEQ ID NO: 922 - DNA, 20 bp, Arachis hypogaea
  source 1..20: mol_type = other DNA
tttggctgtgagagaattca

SEQ ID NO: 923 - DNA, 20 bp, Arachis hypogaea
  source 1..20: mol_type = other DNA
aatgaacatgtagcattgtt

SEQ ID NO: 924 - DNA, 20 bp, Arachis hypogaea
  source 1..20: mol_type = other DNA
gtgaaacaagagtgaggtat

SEQ ID NO: 925 - DNA, 20 bp, Arachis hypogaea
  source 1..20: mol_type = other DNA
tgaacggtgaaacaagagtg

SEQ ID NO: 926 - DNA, 20 bp, Arachis hypogaea
  source 1..20: mol_type = other DNA
agcctttcattcttgctgaa

SEQ ID NO: 927 - DNA, 20 bp, Arachis hypogaea
  source 1..20: mol_type = other DNA
caccgttcagcaagaatgaa

SEQ ID NO: 928 - DNA, 20 bp, Arachis hypogaea
  source 1..20: mol_type = other DNA
agaatgaaaggctatacgtt

SEQ ID NO: 929 - DNA, 20 bp, Arachis hypogaea
  source 1..20: mol_type = other DNA
atctatatcatgagcaaaat

SEQ ID NO: 930 - DNA, 20 bp, Arachis hypogaea
  source 1..20: mol_type = other DNA
catgagcaaaataggacaac

SEQ ID NO: 931 - DNA, 20 bp, Arachis hypogaea
  source 1..20: mol_type = other DNA
ataggacaactggaaaacaa

SEQ ID NO: 932 - DNA, 20 bp, Arachis hypogaea
  source 1..20: mol_type = other DNA
agcaacaacacaacaagaac

SEQ ID NO: 933 - DNA, 20 bp, Arachis hypogaea
  source 1..20: mol_type = other DNA
caacacaacaagaacaggtg

SEQ ID NO: 934 - DNA, 20 bp, Arachis hypogaea
  source 1..20: mol_type = other DNA
tggctctgtaaaagcaagaa

SEQ ID NO: 935 - DNA, 20 bp, Arachis hypogaea
  source 1..20: mol_type = other DNA
taaaagcaagaaaggacact

SEQ ID NO: 936 - DNA, 20 bp, Arachis hypogaea
  source 1..20: mol_type = other DNA
agctgatgtccttggattag

SEQ ID NO: 937 - DNA, 20 bp, Arachis hypogaea
  source 1..20: mol_type = other DNA
ctaggataaccactaatcca

SEQ ID NO: 938 - DNA, 20 bp, Arachis hypogaea
  source 1..20: mol_type = other DNA
tattgctcagctgatgtcct

SEQ ID NO: 939 - DNA, 20 bp, Arachis hypogaea
  source 1..20: mol_type = other DNA
gacatcagctgagcaatact

SEQ ID NO: 940 - DNA, 20 bp, Arachis hypogaea
  source 1..20: mol_type = other DNA
gagcagcagcagcaagaaaa

SEQ ID NO: 941 - DNA, 20 bp, Arachis hypogaea
  source 1..20: mol_type = other DNA
tgcaaaagaagagcatgcca

SEQ ID NO: 942 - DNA, 20 bp, Arachis hypogaea
  source 1..20: mol_type = other DNA
ctttgcttgaccttcttcct

SEQ ID NO: 943 - DNA, 20 bp, Arachis hypogaea
  source 1..20: mol_type = other DNA
gaagagcatgccaaggaaga

SEQ ID NO: 944 - DNA, 20 bp, Arachis hypogaea
  source 1..20: mol_type = other DNA
caaggaagaaggtcaagcaa

SEQ ID NO: 945 - DNA, 20 bp, Arachis hypogaea
  source 1..20: mol_type = other DNA
ggtcaagcaaaggacagcag

SEQ ID NO: 946 - DNA, 20 bp, Arachis hypogaea
  source 1..20: mol_type = other DNA
tccactacctctgctgcttg

SEQ ID NO: 947 - DNA, 20 bp, Arachis hypogaea
  source 1..20: mol_type = other DNA
tcgagctcctcaagcagcag

SEQ ID NO: 948 - DNA, 20 bp, Arachis hypogaea
  source 1..20: mol_type = other DNA
tcctcaagcagcagaggtag

SEQ ID NO: 949 - DNA, 20 bp, Arachis hypogaea
  source 1..20: mol_type = other DNA
gcagcagaggtagtggagca

SEQ ID NO: 950 - DNA, 20 bp, Arachis hypogaea
  source 1..20: mol_type = other DNA
gtagtggagcatggtgaaaa

SEQ ID NO: 951 - DNA, 20 bp, Arachis hypogaea
  source 1..20: mol_type = other DNA
ctcgttggagctgtcatagc

SEQ ID NO: 952 - DNA, 20 bp, Arachis hypogaea
  source 1..20: mol_type = other DNA
tccttgtaccagctactcgt

SEQ ID NO: 953 - DNA, 20 bp, Arachis hypogaea
  source 1..20: mol_type = other DNA
tgacagctccaacgagtagc

SEQ ID NO: 954 - DNA, 20 bp, Arachis hypogaea
  source 1..20: mol_type = other DNA
tccaacgagtagctggtaca

SEQ ID NO: 955 - DNA, 20 bp, Arachis hypogaea
  source 1..20: mol_type = other DNA
ctggtacaaggaaatgaaag

SEQ ID NO: 956 - DNA, 20 bp, Arachis hypogaea
  source 1..20: mol_type = other DNA
cttcttatatatcttcaact

SEQ ID NO: 957 - DNA, 20 bp, Arachis hypogaea
  source 1..20: mol_type = other DNA
cttttttgtttttgaaatgg

SEQ ID NO: 958 - DNA, 20 bp, Arachis hypogaea
  source 1..20: mol_type = other DNA
tctcttttttgtttttgaaa

SEQ ID NO: 959 - DNA, 20 bp, Arachis hypogaea
  source 1..20: mol_type = other DNA
ttccagctctgtgttagaga

SEQ ID NO: 960 - DNA, 20 bp, Arachis hypogaea
  source 1..20: mol_type = other DNA
caccatctctaacacagagc

SEQ ID NO: 961 - DNA, 20 bp, Arachis hypogaea
  source 1..20: mol_type = other DNA
taattctgatttttatgtta

SEQ ID NO: 962 - DNA, 20 bp, Arachis hypogaea
  source 1..20: mol_type = other DNA
ttgttttctgttttgagaaa

SEQ ID NO: 963 - DNA, 20 bp, Arachis hypogaea
  source 1..20: mol_type = other DNA
tgagaaaaggcaattatgcg

SEQ ID NO: 964 - DNA, 20 bp, Arachis hypogaea
  source 1..20: mol_type = other DNA
ttcaaaagtcaagagagaaa

SEQ ID NO: 965 - DNA, 20 bp, Arachis hypogaea
  source 1..20: mol_type = other DNA
caaaatacatcagaaattag

SEQ ID NO: 966 - DNA, 20 bp, Arachis hypogaea
  source 1..20: mol_type = other DNA
cactaatttctgatgtattt

SEQ ID NO: 967 - DNA, 20 bp, Arachis hypogaea
  source 1..20: mol_type = other DNA
actaatttctgatgtatttt

SEQ ID NO: 968 - DNA, 20 bp, Arachis hypogaea
  source 1..20: mol_type = other DNA
gtattttgggtttatgaatt

SEQ ID NO: 969 - DNA, 20 bp, Arachis hypogaea
  source 1..20: mol_type = other DNA
gtgctaacccaacttggtaa

SEQ ID NO: 970 - DNA, 20 bp, Arachis hypogaea
  source 1..20: mol_type = other DNA
agtgctaacccaacttggta

SEQ ID NO: 971 - DNA, 20 bp, Arachis hypogaea
  source 1..20: mol_type = other DNA
attaatttcccttaccaagt

SEQ ID NO: 972 - DNA, 20 bp, Arachis hypogaea
  source 1..20: mol_type = other DNA
ttaatttcccttaccaagtt

SEQ ID NO: 973 - DNA, 20 bp, Arachis hypogaea
  source 1..20: mol_type = other DNA
tcccaagtgctaacccaact

SEQ ID NO: 974 - DNA, 20 bp, Arachis hypogaea
  source 1..20: mol_type = other DNA
taccaagttgggttagcact

SEQ ID NO: 975 - DNA, 20 bp, Arachis hypogaea
  source 1..20: mol_type = other DNA
accaagttgggttagcactt

SEQ ID NO: 976 - DNA, 20 bp, Arachis hypogaea
  source 1..20: mol_type = other DNA
gcacttgggaaaattgaatc

SEQ ID NO: 977 - DNA, 20 bp, Arachis hypogaea
  source 1..20: mol_type = other DNA
gtgctgacccaactagtagt

SEQ ID NO: 978 - DNA, 20 bp, Arachis hypogaea
  source 1..20: mol_type = other DNA
agtgctgacccaactagtag

SEQ ID NO: 979 - DNA, 20 bp, Arachis hypogaea
  source 1..20: mol_type = other DNA
ggttgattcccactactagt

SEQ ID NO: 980 - DNA, 20 bp, Arachis hypogaea
  source 1..20: mol_type = other DNA
gttgattcccactactagtt

SEQ ID NO: 981 - DNA, 20 bp, Arachis hypogaea
  source 1..20: mol_type = other DNA
tactagttgggtcagcacta

SEQ ID NO: 982 - DNA, 20 bp, Arachis hypogaea
  source 1..20: mol_type = other DNA
actagttgggtcagcactat

SEQ ID NO: 983 - DNA, 20 bp, Arachis hypogaea
  source 1..20: mol_type = other DNA
actatgggaagctaaacttt

SEQ ID NO: 984 - DNA, 20 bp, Arachis hypogaea
  source 1..20: mol_type = other DNA
acttttggtgatgaaagctt

SEQ ID NO: 985 - DNA, 20 bp, Arachis hypogaea
  source 1..20: mol_type = other DNA
cttttggtgatgaaagctta

SEQ ID NO: 986 - DNA, 20 bp, Arachis hypogaea
  source 1..20: mol_type = other DNA
ttttggtgatgaaagcttag

SEQ ID NO: 987 - DNA, 20 bp, Arachis hypogaea
  source 1..20: mol_type = other DNA
tttggtgatgaaagcttagg

SEQ ID NO: 988 - DNA, 20 bp, Arachis hypogaea
  source 1..20: mol_type = other DNA
gggtagatactagttgaatt

SEQ ID NO: 989 - DNA, 20 bp, Arachis hypogaea
  source 1..20: mol_type = other DNA
aggaaaaaattcaatactat

SEQ ID NO: 990 - DNA, 20 bp, Arachis hypogaea
  source 1..20: mol_type = other DNA
gtctccaccacaaactatgg

SEQ ID NO: 991 - DNA, 20 bp, Arachis hypogaea
  source 1..20: mol_type = other DNA
ccagtctccaccacaaacta

SEQ ID NO: 992 - DNA, 20 bp, Arachis hypogaea
  source 1..20: mol_type = other DNA
gaaaattccaccatagtttg

SEQ ID NO: 993 - DNA, 20 bp, Arachis hypogaea
  source 1..20: mol_type = other DNA
aattccaccatagtttgtgg

SEQ ID NO: 994 - DNA, 20 bp, Arachis hypogaea
  source 1..20: mol_type = other DNA
ccatagtttgtggtggagac

SEQ ID NO: 995 - DNA, 20 bp, Arachis hypogaea
  source 1..20: mol_type = other DNA
ttgtggtggagactggatgt

SEQ ID NO: 996 - DNA, 20 bp, Arachis hypogaea
  source 1..20: mol_type = other DNA
gagactggatgtaggattca

SEQ ID NO: 997 - DNA, 20 bp, Arachis hypogaea
  source 1..20: mol_type = other DNA
gaccagcatgtatcttggtt

SEQ ID NO: 998 - DNA, 20 bp, Arachis hypogaea
  source 1..20: mol_type = other DNA
atgaagaccagcatgtatct

SEQ ID NO: 999 - DNA, 20 bp, Arachis hypogaea
  source 1..20: mol_type = other DNA
atccgaaccaagatacatgc

SEQ ID NO: 1000 - DNA, 20 bp, Arachis hypogaea
  source 1..20: mol_type = other DNA
acgcagaacataaaagagca

SEQ ID NO: 1001 - DNA, 20 bp, Arachis hypogaea
  source 1..20: mol_type = other DNA
tacgcagaacataaaagagc

SEQ ID NO: 1002 - DNA, 20 bp, Arachis hypogaea
  source 1..20: mol_type = other DNA
atctgttgctttcaagttgc

SEQ ID NO: 1003 - DNA, 20 bp, Arachis hypogaea
  source 1..20: mol_type = other DNA
agaagggggttgaatcaagt

SEQ ID NO: 1004 - DNA, 20 bp, Arachis hypogaea
  source 1..20: mol_type = other DNA
tctagttgaacttgagaagg

SEQ ID NO: 1005 - DNA, 20 bp, Arachis hypogaea
  source 1..20: mol_type = other DNA
ttctagttgaacttgagaag

SEQ ID NO: 1006 - DNA, 20 bp, Arachis hypogaea
  source 1..20: mol_type = other DNA
gttctagttgaacttgagaa

SEQ ID NO: 1007 - DNA, 20 bp, Arachis hypogaea
  source 1..20: mol_type = other DNA
ggttctagttgaacttgaga

SEQ ID NO: 1008 - DNA, 20 bp, Arachis hypogaea
  source 1..20: mol_type = other DNA
gtatttatgtataaatatga

SEQ ID NO: 1009 - DNA, 20 bp, Arachis hypogaea
  source 1..20: mol_type = other DNA
tttatacataaatacattag

SEQ ID NO: 1010 - DNA, 20 bp, Arachis hypogaea
  source 1..20: mol_type = other DNA
tatattgatataagatactt

SEQ ID NO: 1011 - DNA, 20 bp, Arachis hypogaea
  source 1..20: mol_type = other DNA
atattgatataagatactta

SEQ ID NO: 1012 - DNA, 20 bp, Arachis hypogaea
  source 1..20: mol_type = other DNA
tgatataagatacttagggt

SEQ ID NO: 1013 - DNA, 20 bp, Arachis hypogaea
  source 1..20: mol_type = other DNA
taaaaaaaatcgctagttac

SEQ ID NO: 1014 - DNA, 20 bp, Arachis hypogaea
  source 1..20: mol_type = other DNA
ctaaaaaaaatcgctagtta

SEQ ID NO: 1015 - DNA, 20 bp, Arachis hypogaea
  source 1..20: mol_type = other DNA
ttagcgtttatatcttttat

SEQ ID NO: 1016 - DNA, 20 bp, Arachis hypogaea
  source 1..20: mol_type = other DNA
attagcgtttatatctttta

SEQ ID NO: 1017 - DNA, 20 bp, Arachis hypogaea
  source 1..20: mol_type = other DNA
taaaacgacgattataatta

SEQ ID NO: 1018 - DNA, 20 bp, Arachis hypogaea
  source 1..20: mol_type = other DNA
acgattataattatggaaga

SEQ ID NO: 1019 - DNA, 20 bp, Arachis hypogaea
  source 1..20: mol_type = other DNA
cctctgtatgtcaaaaatat

SEQ ID NO: 1020 - DNA, 20 bp, Arachis hypogaea
  source 1..20: mol_type = other DNA
ccgatatttttgacatacag

SEQ ID NO: 1021 - DNA, 20 bp, Arachis hypogaea
  source 1..20: mol_type = other DNA
acaattgtaaccacgaaaga

SEQ ID NO: 1022 - DNA, 20 bp, Arachis hypogaea
  source 1..20: mol_type = other DNA
catacagaggccatctttcg

SEQ ID NO: 1023 - DNA, 20 bp, Arachis hypogaea
  source 1..20: mol_type = other DNA
acacatgaaaaatatagacg

SEQ ID NO: 1024 - DNA, 20 bp, Arachis hypogaea
  source 1..20: mol_type = other DNA
aagtacataggcatcaggaa

SEQ ID NO: 1025 - DNA, 20 bp, Arachis hypogaea
  source 1..20: mol_type = other DNA
aaagtacataggcatcagga

SEQ ID NO: 1026 - DNA, 20 bp, Arachis hypogaea
  source 1..20: mol_type = other DNA
ataaaaagtacataggcatc

SEQ ID NO: 1027 - DNA, 20 bp, Arachis hypogaea
  source 1..20: mol_type = other DNA
attaaaaataaaaagtacat

SEQ ID NO: 1028 - DNA, 20 bp, Arachis hypogaea
  source 1..20: mol_type = other DNA
gtactttttatttttaatat

SEQ ID NO: 1029 - DNA, 20 bp, Arachis hypogaea
  source 1..20: mol_type = other DNA
ttttaatattggagtagtag

SEQ ID NO: 1030 - DNA, 20 bp, Arachis hypogaea
  source 1..20: mol_type = other DNA
gtggtgcgttttttaaaatg

SEQ ID NO: 1031 - DNA, 20 bp, Arachis hypogaea
  source 1..20: mol_type = other DNA
gcgttttttaaaatgtggat

SEQ ID NO: 1032 - DNA, 20 bp, Arachis hypogaea
  source 1..20: mol_type = other DNA
ttttaaaatgtggattggtt

SEQ ID NO: 1033 - DNA, 20 bp, Arachis hypogaea
  source 1..20: mol_type = other DNA
caaatgtagaatagtttaac

SEQ ID NO: 1034 - DNA, 20 bp, Arachis hypogaea
  source 1..20: mol_type = other DNA
ttaactggagaagtagaaat

SEQ ID NO: 1035 - DNA, 20 bp, Arachis hypogaea
  source 1..20: mol_type = other DNA
ctggagaagtagaaatcgga

SEQ ID NO: 1036 - DNA, 20 bp, Arachis hypogaea
  source 1..20: mol_type = other DNA
tttctgtatctctaataaat

SEQ ID NO: 1037 - DNA, 20 bp, Arachis hypogaea
  source 1..20: mol_type = other DNA
gtgtacttctaaaaatcgga

SEQ ID NO: 1038 - DNA, 20 bp, Arachis hypogaea
  source 1..20: mol_type = other DNA
atttgtgtacttctaaaaat

SEQ ID NO: 1039 - DNA, 20 bp, Arachis hypogaea
  source 1..20: mol_type = other DNA
atttttagaagtacacaaat

SEQ ID NO: 1040 - DNA, 20 bp, Arachis hypogaea
  source 1..20: mol_type = other DNA
cggactgtttgatttatgag

SEQ ID NO: 1041 - DNA, 20 bp, Arachis hypogaea
  source 1..20: mol_type = other DNA
aaattttttttaacacaaat

SEQ ID NO: 1042 - DNA, 20 bp, Arachis hypogaea
  source 1..20: mol_type = other DNA
aaaatttgaaatagagaaat

SEQ ID NO: 1043 - DNA, 20 bp, Arachis hypogaea
  source 1..20: mol_type = other DNA
gtgaaaataaacaaatcgga

SEQ ID NO: 1044 - DNA, 20 bp, Arachis hypogaea
  source 1..20: mol_type = other DNA
tgtgaaaataaacaaatcgg

SEQ ID NO: 1045 - DNA, 20 bp, Arachis hypogaea
  source 1..20: mol_type = other DNA
aactgtgaaaataaacaaat

SEQ ID NO: 1046 - DNA, 20 bp, Arachis hypogaea
  source 1..20: mol_type = other DNA
tcggttaattttttgtgtta

SEQ ID NO: 1047 - DNA, 20 bp, Arachis hypogaea
  source 1..20: mol_type = other DNA
taatgttaggtaataaacat

SEQ ID NO: 1048 - DNA, 20 bp, Arachis hypogaea
  source 1..20: mol_type = other DNA
tttttattattcttaatgtt

SEQ ID NO: 1049 - DNA, 20 bp, Arachis hypogaea
  source 1..20: mol_type = other DNA
ttttcatcttttaagtgtga

SEQ ID NO: 1050 - DNA, 20 bp, Arachis hypogaea
  source 1..20: mol_type = other DNA
tcagatatcaattttatgtg

SEQ ID NO: 1051 - DNA, 20 bp, Arachis hypogaea
  source 1..20: mol_type = other DNA
aatttagtaaaatcatctaa

SEQ ID NO: 1052 - DNA, 20 bp, Arachis hypogaea
  source 1..20: mol_type = other DNA
atttagtaaaatcatctaac

SEQ ID NO: 1053 - DNA, 20 bp, Arachis hypogaea
  source 1..20: mol_type = other DNA
ctctcaaatatcaattttat

SEQ ID NO: 1054 - DNA, 20 bp, Arachis hypogaea
  source 1..20: mol_type = other DNA
gtttaatgtttatgagtggg

SEQ ID NO: 1055 - DNA, 20 bp, Arachis hypogaea
  source 1..20: mol_type = other DNA
attgtttaatgtttatgagt

SEQ ID NO: 1056 - DNA, 20 bp, Arachis hypogaea
  source 1..20: mol_type = other DNA
cattgtttaatgtttatgag

SEQ ID NO: 1057 - DNA, 20 bp, Arachis hypogaea
  source 1..20: mol_type = other DNA
cattaaacaatgtatctaac

SEQ ID NO: 1058 - DNA, 20 bp, Arachis hypogaea
  source 1..20: mol_type = other DNA
cttgctcatgcctaattctc

SEQ ID NO: 1059 - DNA, 20 bp, Arachis hypogaea
  source 1..20: mol_type = other DNA
atgtatctaaccggagaatt

SEQ ID NO: 1060 - DNA, 20 bp, Arachis hypogaea
  source 1..20: mol_type = other DNA
caacggggaccacgcatgca

SEQ ID NO: 1061 - DNA, 20 bp, Arachis hypogaea
  source 1..20: mol_type = other DNA
gaactgaagccgtgcatgcg

SEQ ID NO: 1062 - DNA, 20 bp, Arachis hypogaea
  source 1..20: mol_type = other DNA
tctgcgatttcttcacaacg

SEQ ID NO: 1063 - DNA, 20 bp, Arachis hypogaea
  source 1..20: mol_type = other DNA
atctgcgatttcttcacaac

SEQ ID NO: 1064 - DNA, 20 bp, Arachis hypogaea
  source 1..20: mol_type = other DNA
tatctgcgatttcttcacaa

SEQ ID NO: 1065 - DNA, 20 bp, Arachis hypogaea
  source 1..20: mol_type = other DNA
gataaatgcttagctgtgca

SEQ ID NO: 1066 - DNA, 20 bp, Arachis hypogaea
  source 1..20: mol_type = other DNA
cttagctgtgcatggagaca

SEQ ID NO: 1067 - DNA, 20 bp, Arachis hypogaea
  source 1..20: mol_type = other DNA
tgttatagagatgctttgcg

SEQ ID NO: 1068 - DNA, 20 bp, Arachis hypogaea
  source 1..20: mol_type = other DNA
tgctttgcgaggtgtaacaa

SEQ ID NO: 1069 - DNA, 20 bp, Arachis hypogaea
  source 1..20: mol_type = other DNA
ttgcgaggtgtaacaaagga

SEQ ID NO: 1070 - DNA, 20 bp, Arachis hypogaea
  source 1..20: mol_type = other DNA
tgcgaggtgtaacaaaggaa

SEQ ID NO: 1071 - DNA, 20 bp, Arachis hypogaea
  source 1..20: mol_type = other DNA
ctcttcagcatgcatggcta

SEQ ID NO: 1072 - DNA, 20 bp, Arachis hypogaea
  source 1..20: mol_type = other DNA
gggacactcttcagcatgca

SEQ ID NO: 1073 - DNA, 20 bp, Arachis hypogaea
  source 1..20: mol_type = other DNA
agttggtagactgagcaatt

SEQ ID NO: 1074 - DNA, 20 bp, Arachis hypogaea
  source 1..20: mol_type = other DNA
gagttggtagactgagcaat

SEQ ID NO: 1075 - DNA, 20 bp, Arachis hypogaea
  source 1..20: mol_type = other DNA
acacgtcggagaaagtgagt

SEQ ID NO: 1076 - DNA, 20 bp, Arachis hypogaea
  source 1..20: mol_type = other DNA
gggtgaaggaagggacacgt

SEQ ID NO: 1077 - DNA, 20 bp, Arachis hypogaea
  source 1..20: mol_type = other DNA
gcgagaggagggtgaaggaa

SEQ ID NO: 1078 - DNA, 20 bp, Arachis hypogaea
  source 1..20: mol_type = other DNA
ggcgagaggagggtgaagga

SEQ ID NO: 1079 - DNA, 20 bp, Arachis hypogaea
  source 1..20: mol_type = other DNA
agggggcgagaggagggtga

SEQ ID NO: 1080 - DNA, 20 bp, Arachis hypogaea
  source 1..20: mol_type = other DNA
atttatagggggcgagagga

SEQ ID NO: 1081 - DNA, 20 bp, Arachis hypogaea
  source 1..20: mol_type = other DNA
gatttatagggggcgagagg

SEQ ID NO: 1082 - DNA, 20 bp, Arachis hypogaea
  source 1..20: mol_type = other DNA
cgtgatttatagggggcgag

SEQ ID NO: 1083 - DNA, 20 bp, Arachis hypogaea
  source 1..20: mol_type = other DNA
gaagcgacgtgatttatagg

SEQ ID NO: 1084 - DNA, 20 bp, Arachis hypogaea
  source 1..20: mol_type = other DNA
agaagcgacgtgatttatag

SEQ ID NO: 1085 - DNA, 20 bp, Arachis hypogaea
  source 1..20: mol_type = other DNA
gagaagcgacgtgatttata

SEQ ID NO: 1086 - DNA, 20 bp, Arachis hypogaea
  source 1..20: mol_type = other DNA
tgagaagcgacgtgatttat

SEQ ID NO: 1087 - DNA, 20 bp, Arachis hypogaea
  source 1..20: mol_type = other DNA
ttggtgtggttgtgatgaag

SEQ ID NO: 1088 - DNA, 20 bp, Arachis hypogaea
  source 1..20: mol_type = other DNA
tgctattattgttattggtg

SEQ ID NO: 1089 - DNA, 20 bp, Arachis hypogaea
  source 1..20: mol_type = other DNA
atggctgctattattgttat

SEQ ID NO: 1090 - DNA, 20 bp, Arachis hypogaea
  source 1..20: mol_type = other DNA
aataacaataatagcagcca

SEQ ID NO: 1091 - DNA, 20 bp, Arachis hypogaea
  source 1..20: mol_type = other DNA
aagcgcaagaagcttagcca

SEQ ID NO: 1092 - DNA, 20 bp, Arachis hypogaea
  source 1..20: mol_type = other DNA
ttgcttttgctttctagttc

SEQ ID NO: 1093 - DNA, 20 bp, Arachis hypogaea
  source 1..20: mol_type = other DNA
tgcttttgctttctagttct

SEQ ID NO: 1094 - DNA, 20 bp, Arachis hypogaea
  source 1..20: mol_type = other DNA
gagctagcagcatctccttc

SEQ ID NO: 1095 - DNA, 20 bp, Arachis hypogaea
  source 1..20: mol_type = other DNA
ctcctccggctgctgcctga

SEQ ID NO: 1096 - DNA, 20 bp, Arachis hypogaea
  source 1..20: mol_type = other DNA
catctccttcaggcagcagc

SEQ ID NO: 1097 - DNA, 20 bp, Arachis hypogaea
  source 1..20: mol_type = other DNA
ctccttcaggcagcagccgg

SEQ ID NO: 1098 - DNA, 20 bp, Arachis hypogaea
  source 1..20: mol_type = other DNA
aactggcacgcattctcctc

SEQ ID NO: 1099 - DNA, 20 bp, Arachis hypogaea
  source 1..20: mol_type = other DNA
gcgcattgaggcgctggaac

SEQ ID NO: 1100 - DNA, 20 bp, Arachis hypogaea
  source 1..20: mol_type = other DNA
gtctctgcgcattgaggcgc

SEQ ID NO: 1101 - DNA, 20 bp, Arachis hypogaea
  source 1..20: mol_type = other DNA
tgtcaggtctctgcgcattg

SEQ ID NO: 1102 - DNA, 20 bp, Arachis hypogaea
  source 1..20: mol_type = other DNA
tctgattcaatgcgattgtc

SEQ ID NO: 1103 - DNA, 20 bp, Arachis hypogaea
  source 1..20: mol_type = other DNA
tgacaatcgcattgaatcag

SEQ ID NO: 1104 - DNA, 20 bp, Arachis hypogaea
  source 1..20: mol_type = other DNA
gacaatcgcattgaatcaga

SEQ ID NO: 1105 - DNA, 20 bp, Arachis hypogaea
  source 1..20: mol_type = other DNA
aatcgcattgaatcagaggg

SEQ ID NO: 1106 - DNA, 20 bp, Arachis hypogaea
  source 1..20: mol_type = other DNA
agggcggttacattgagact

SEQ ID NO: 1107 - DNA, 20 bp, Arachis hypogaea
  source 1..20: mol_type = other DNA
attcgaactcctggttgttg

SEQ ID NO: 1108 - DNA, 20 bp, Arachis hypogaea
  source 1..20: mol_type = other DNA
cattcgaactcctggttgtt

SEQ ID NO: 1109 - DNA, 20 bp, Arachis hypogaea
  source 1..20: mol_type = other DNA
gacttggaaccccaacaacc

SEQ ID NO: 1110 - DNA, 20 bp, Arachis hypogaea
  source 1..20: mol_type = other DNA
gcattcgaactcctggttgt

SEQ ID NO: 1111 - DNA, 20 bp, Arachis hypogaea
  source 1..20: mol_type = other DNA
cgccggcgcattcgaactcc

SEQ ID NO: 1112 - DNA, 20 bp, Arachis hypogaea
  source 1..20: mol_type = other DNA
aaccaggagttcgaatgcgc

SEQ ID NO: 1113 - DNA, 20 bp, Arachis hypogaea
  source 1..20: mol_type = other DNA
taagcgagagagggcgacgc

SEQ ID NO: 1114 - DNA, 20 bp, Arachis hypogaea
  source 1..20: mol_type = other DNA
gcggaggactaagcgagaga

SEQ ID NO: 1115 - DNA, 20 bp, Arachis hypogaea
  source 1..20: mol_type = other DNA
ggcggaggactaagcgagag

SEQ ID NO: 1116 - DNA, 20 bp, Arachis hypogaea
  source 1..20: mol_type = other DNA
tacgaagggcgttgcggcgg

SEQ ID NO: 1117 - DNA, 20 bp, Arachis hypogaea
  source 1..20: mol_type = other DNA
gcctacgaagggcgttgcgg

SEQ ID NO: 1118 - DNA, 20 bp, Arachis hypogaea
  source 1..20: mol_type = other DNA
aaggcctacgaagggcgttg

SEQ ID NO: 1119 - DNA, 20 bp, Arachis hypogaea
  source 1..20: mol_type = other DNA
tccgccgcaacgcccttcgt

SEQ ID NO: 1120 - DNA, 20 bp, Arachis hypogaea
  source 1..20: mol_type = other DNA
ggagtagaaaggcctacgaa

SEQ ID NO: 1121 - DNA, 20 bp, Arachis hypogaea
  source 1..20: mol_type = other DNA
tggagtagaaaggcctacga

SEQ ID NO: 1122 - DNA, 20 bp, Arachis hypogaea
  source 1..20: mol_type = other DNA
tggggagcattggagtagaa

SEQ ID NO: 1123 - DNA, 20 bp, Arachis hypogaea
  source 1..20: mol_type = other DNA
gaagatctcctggggagcat

SEQ ID NO: 1124 - DNA, 20 bp, Arachis hypogaea
  source 1..20: mol_type = other DNA
tttctactccaatgctcccc

SEQ ID NO: 1125 - DNA, 20 bp, Arachis hypogaea
  source 1..20: mol_type = other DNA
tgctggatgaagatctcctg

SEQ ID NO: 1126 - DNA, 20 bp, Arachis hypogaea
  source 1..20: mol_type = other DNA
ttgctggatgaagatctcct

SEQ ID NO: 1127 - DNA, 20 bp, Arachis hypogaea
  source 1..20: mol_type = other DNA
cttgctggatgaagatctcc

SEQ ID NO: 1128 - DNA, 20 bp, Arachis hypogaea
  source 1..20: mol_type = other DNA
caggagatcttcatccagca

SEQ ID NO: 1129 - DNA, 20 bp, Arachis hypogaea
  source 1..20: mol_type = other DNA
gtaataagtaataaccttgc

SEQ ID NO: 1130 - DNA, 20 bp, Arachis hypogaea
  source 1..20: mol_type = other DNA
aaattaacaaacaaagatca

SEQ ID NO: 1131 - DNA, 20 bp, Arachis hypogaea
  source 1..20: mol_type = other DNA
cattttgaatgaacacatac

SEQ ID NO: 1132 - DNA, 20 bp, Arachis hypogaea
  source 1..20: mol_type = other DNA
ttgaatgaacacatacagga

SEQ ID NO: 1133 - DNA, 20 bp, Arachis hypogaea
  source 1..20: mol_type = other DNA
tgaatgaacacatacaggaa

SEQ ID NO: 1134 - DNA, 20 bp, Arachis hypogaea
  source 1..20: mol_type = other DNA
gaatgaacacatacaggaag

SEQ ID NO: 1135 - DNA, 20 bp, Arachis hypogaea
  source 1..20: mol_type = other DNA
catacaggaaggggatactt

SEQ ID NO: 1136 - DNA, 20 bp, Arachis hypogaea
  source 1..20: mol_type = other DNA
atacaggaaggggatacttt

SEQ ID NO: 1137 - DNA, 20 bp, Arachis hypogaea
  source 1..20: mol_type = other DNA
tactttgggttgatattccc

SEQ ID NO: 1138 - DNA, 20 bp, Arachis hypogaea
  source 1..20: mol_type = other DNA
catatgtgctaggacaacca

SEQ ID NO: 1139 - DNA, 20 bp, Arachis hypogaea
  source 1..20: mol_type = other DNA
tcatatgtgctaggacaacc

SEQ ID NO: 1140 - DNA, 20 bp, Arachis hypogaea
  source 1..20: mol_type = other DNA
gcaggctcttcatatgtgct

SEQ ID NO: 1141 - DNA, 20 bp, Arachis hypogaea
  source 1..20: mol_type = other DNA
gatcgacgtccttgttgtgc

SEQ ID NO: 1142 - DNA, 20 bp, Arachis hypogaea
  source 1..20: mol_type = other DNA
tatgaagagcctgcacaaca

SEQ ID NO: 1143 - DNA, 20 bp, Arachis hypogaea
  source 1..20: mol_type = other DNA
aagacgtcttggtggtcttt

SEQ ID NO: 1144 - DNA, 20 bp, Arachis hypogaea
  source 1..20: mol_type = other DNA
gaagacgtcttggtggtctt

SEQ ID NO: 1145 - DNA, 20 bp, Arachis hypogaea
  source 1..20: mol_type = other DNA
tctccttgaagacgtcttgg

SEQ ID NO: 1146 - DNA, 20 bp, Arachis hypogaea
  source 1..20: mol_type = other DNA
tcttctccttgaagacgtct

SEQ ID NO: 1147 - DNA, 20 bp, Arachis hypogaea
  source 1..20: mol_type = other DNA
agaccaccaagacgtcttca

SEQ ID NO: 1148 - DNA, 20 bp, Arachis hypogaea
  source 1..20: mol_type = other DNA
tatcttgttgctgttggctt

SEQ ID NO: 1149 - DNA, 20 bp, Arachis hypogaea
  source 1..20: mol_type = other DNA
ggtgactatcttgttgctgt

SEQ ID NO: 1150 - DNA, 20 bp, Arachis hypogaea
  source 1..20: mol_type = other DNA
gcaacaagatagtcaccaga

SEQ ID NO: 1151 - DNA, 20 bp, Arachis hypogaea
  source 1..20: mol_type = other DNA
catcgaaacggtgcaccttc

SEQ ID NO: 1152 - DNA, 20 bp, Arachis hypogaea
  source 1..20: mol_type = other DNA
tgagatcaccctcatcgaaa

SEQ ID NO: 1153 - DNA, 20 bp, Arachis hypogaea
  source 1..20: mol_type = other DNA
gaaggtgcaccgtttcgatg

SEQ ID NO: 1154 - DNA, 20 bp, Arachis hypogaea
  source 1..20: mol_type = other DNA
aaggtgcaccgtttcgatga

SEQ ID NO: 1155 - DNA, 20 bp, Arachis hypogaea
  source 1..20: mol_type = other DNA
gatctcattgcagttcccac

SEQ ID NO: 1156 - DNA, 20 bp, Arachis hypogaea
  source 1..20: mol_type = other DNA
agccagaaagcaacaccggt

SEQ ID NO: 1157 - DNA, 20 bp, Arachis hypogaea
  source 1..20: mol_type = other DNA
gagccagaaagcaacaccgg

SEQ ID NO: 1158 - DNA, 20 bp, Arachis hypogaea
  source 1..20: mol_type = other DNA
gtagagccagaaagcaacac

SEQ ID NO: 1159 - DNA, 20 bp, Arachis hypogaea
  source 1..20: mol_type = other DNA
ttcccaccggtgttgctttc

SEQ ID NO: 1160 - DNA, 20 bp, Arachis hypogaea
  source 1..20: mol_type = other DNA
cagcaacaacatcagtgtcg

SEQ ID NO: 1161 - DNA, 4698 bp, Arachis hypogaea
  source 1..4698: mol_type = genomic DNA
cgtatagcttttctttcttcttctctcttgaaaatgataggaaaaagacagagttgcagatggacaacataatagttactattttagtaataactaggcattattaactgagtaatgttgtatttgtatattaaaagtgcatctagtggtaagtggattcaagattgtgtgctacattctagtgtacactcgatctatagactatagtgcataatatggtttgatttatcatttccaatatttcagagttaagtttctgttgtaaaaaagtagagtgatcttttctatattctgcctgaacactttgtatttaatctacatgattaagtttcctttattaatttgccgtgattactgacttttttgggtagggatctggaggcatcaccataaagaaaaccgggcaagctctagttttcggcgtctatgaggaaccagttactcctggacaatgcaacatggttgttgagaggttgggagattacctcgttgatcagggtctgtagatgaacctggatctttgaagatttgaacaatttttgtttgggtattatatgctttttattatattcagttttggtctgcacttctacatttcaaccctaaattgggtgttgtcgcagacaataaccatttgaggattaaacagtttatttcttgttggttgtttaaatttcgttactctagtttcttcttttttatccatatcctgtactgttatgagcactacatgagaggatttattccaataatgtatgataatcatgatttgcgtcctaagcaggacttaattttgcaacatcctgaagttggaaagattgaactttgaaatccgcatattaatgcagtgattacatgaaatcttttgtctgaattactgaattgggatcttttgttttttttttttctccattattttgaattagaaatgtggtatttcgagcaaaaaaggttttcaacctgttaattttccaccgaagaattagaatgtacaaaccttttagaagcgtggaatgaaaatcattatataaaaatgcataatcaataattaaggtgttagactataaaattaaaatttatagtagtgaacactgaacaagacaatatagtgttttggtctaattcgacaatatatacttatctaaataaaccctaaacttgcacttcctcaatcctagagggcagagggtgcactttataacaagatcatccgttatttttatgtatttttgtcaatttttaacaaattgatagtggttcgattctaatgatttgggagcgaaacctactcctcttttgtatgtatcaattttctataagtgcatcaaagtgtcttcgattagacgggtatcgatatgaaagataaattaaaatttgtaaaataataaaagaaataaagaagaaagctttcgaaaaaataaattgactgaaaaccgaaaagattgcgtcaaaatttaaagaaagctataaaatatcctcgactggatcaaaggggttttgacataaaacttaaaggtgtgaaatataaattggacattgaaatttaaaaatgcctgaaagataaatttacttgaaaagtaaagtttacgtaaagataaactgagaaggtaaaattatggaaagaaccctgcagaaaagagactcgatcgcagactcagaaaatcgttgagaatatgaatgtgtttgagtgttttctgagttaaagttctaactcttatttcttaaaactttttaatatttataattttctttttgtaaccaatcattaattacacaatactgtcttgtgcacgcactttctggtgaccattttcactcatttgccaataaaattttacccattaattctttacatggtacaaaccctcaactcctccacttatgtaatcgttggattcatttacttcgaacatttttttgattttttcttcaaatatccattctattaaacccactcaatttaataacgggtccgaaatcgaacttgtattgaatgacgctcaacttataccatgtgcactttcaaatatttcgatctgattcattccaatctaaatatttttcgaccaacaggagtatcatttccctttctatgcaaaaaaatggacatgctactcactattttttaattatgaatggtgttaaagttcaatttacataaaaaagagaggccactacacgaatttccattgaaatatgacatataagtaaaagggtaaaaaagccggatgacctgatgaaatgattaaatctagtagtcaacatttattaatacttttaaaattatattatccatcagagataaatacgtatgataaaatattaaattattttcaaattttatccagttgatttatatgattaaatatttcaatttacttgttagatcaataaagcataaaatgtataaaaaaatacaatgtattcatatttataataaaattttaaagaacatataattaaacaaaattaatatctataattaacatatgaataaaatcacaaaacacacaatggtaactactttttttatgtttatgtaaagtttgatattttaaaaagtgtgattaaattactaaataatacacacaaatatgacgatttattgtgttcatagaataattttgaaaaaaattcattaagaagcatgtagaataatactataatttattatatattctttttaatttttgtaattgttaaataatatttgtgttacttagttattgtcacaactcacaacattttcttaaaaataaagtaaaaattcggaaaaacattttataagaaaagaaaattgaaaaggaaaaaaagaaaagaaaaagaaaggaactgacagaaacgacacttttgtttgaaaggagtcaagtctaaggagtagcgaatatttagggggaattggtaatgaaaatggcaaaaagtactggtaatgacaagggcattctagtaattcaacgtgaggacaatatcaacgtatggattttttttatagctccgtggtttcaacgctacagcatcagcatttcagcacagttcacagtactacttgagttattattagtactcaaattttctcaggaaaaaaaaaaaaacactcccaacttccagagaaagagaaaacaagatgtcgtggcaaacctacgtcgatgaccaccttctctgcgaaattgaaggcaaccacctctcctccgccgcaatcctcggccaagacggcagtgtttgggctcagagctctaatttccctcaggttatctttaatacttctcaatttctctctccaaaactctccttcttctttcttagttctttgttttccagattcttctcgttcttttttttttccccgttaattttcctccgatttatcagatttgatttgcatgagacatatcctatggttttggtgttaatttgatacattcgtgctttaaccatagctgtttagttttatcaactggagctaattgattcatttttcagattcttaatgtttcacttgttaagtgcaatttatgctgtaaattaaagcttggagagagtcattaggaatgacttggagtttggactgtgtgattatctgatatgagatgcattgcattcctttttatatgaaatcatacactcgttattgttatatatgaaatcgtgtattcacatcacttgtgcaagtaacatgtggctggggatttcaagtgtgtttggttcatagcacaagtcaagtgatccttgcagatctgaaatagttttagttgatctgttcttgattggtcttttgtgttgtgcagttcaagcctgaggaaattactgctatcatgaacgactttgctgagcctggatcgctcgcccctaccgggttgtacctcggtggcaccaaatacatggttatccaaggtgaacccggagctgtcattcgagggaagaaggtactgactgtttctaattataacttgaattttgattgcacaagttcatcaaagaaaatacaacaatctatgataatgtgaatctgctaatctgattgagtaaatttatgatgtaatcatggattcaaattgtggtatgtgactgcattaggccatagcttacaatgaatcagcatcagcttaaaactcattggctcattgctgcaccatgtccataccgttgttaccttgatgctggttttggccattggttgttaaaatctcagcttgtccttgtcgtgcagggtcctggtggtgttaccattaagaagacgaatcaggcgttgatcatcggaatctacgatgagccaatgactccagggcagtgcaacatgattgttgaaaggctgggtgattatctcattgatacgggtctttaagtcctctttgttatttcttgttatctgcttgcttatttcactggctcctatacaaggcttcgcatcgatttgccaagagaatgctcgattgtagtgtaataatattaattaatgggtattcaaaagtcatgggatctgcgtctagggaagaagttatggtgcttgagaagtgaatgataactataatctctgttgttgtgctttttagcgggtatctgtatacaatttacaagtggttttaatgctatgggcatagattggcataactttctaaaaccttatatctcccgtgctttttcttcttctcaattttatctatgcccaaggaatataatgttattatcttcactgattca

SEQ ID NO: 1162 - protein, 131 aa, Arachis hypogaea
MSWQTYVDDHLLCEIEGNHLSSAAILGQDGSVWAQSSNFPQFKPEEITAIMNDFAEPGSLAPTGLYLGGTKYMVIQGEPGAVIRGKKGPGGVTIKKTNQALIIGIYDEPMTPGQCNMIVERLGDYLIDTGL

SEQ ID NO: 1163 - DNA, 20 bp, Arachis hypogaea
  source 1..20: mol_type = other DNA
tcttctctcttgaaaatgat

SEQ ID NO: 1164 - DNA, 20 bp, Arachis hypogaea
  source 1..20: mol_type = other DNA
gaaaaagacagagttgcaga

SEQ ID NO: 1165 - DNA, 20 bp, Arachis hypogaea
  source 1..20: mol_type = other DNA
ttactattttagtaataact

SEQ ID NO: 1166 - DNA, 20 bp, Arachis hypogaea
  source 1..20: mol_type = other DNA
tatattaaaagtgcatctag

SEQ ID NO: 1167 - DNA, 20 bp, Arachis hypogaea
  source 1..20: mol_type = other DNA
aaagtgcatctagtggtaag

SEQ ID NO: 1168 - DNA, 20 bp, Arachis hypogaea
  source 1..20: mol_type = other DNA
atagactatagtgcataata

SEQ ID NO: 1169 - DNA, 20 bp, Arachis hypogaea
  source 1..20: mol_type = other DNA
gaaacttaactctgaaatat

SEQ ID NO: 1170 - DNA, 20 bp, Arachis hypogaea
  source 1..20: mol_type = other DNA
agattaaatacaaagtgttc

SEQ ID NO: 1171 - DNA, 20 bp, Arachis hypogaea
  source 1..20: mol_type = other DNA
taatcacggcaaattaataa

SEQ ID NO: 1172 - DNA, 20 bp, Arachis hypogaea
  source 1..20: mol_type = other DNA
cccaaaaaagtcagtaatca

SEQ ID NO: 1173 - DNA, 20 bp, Arachis hypogaea
  source 1..20: mol_type = other DNA
gccgtgattactgacttttt

SEQ ID NO: 1174 - DNA, 20 bp, Arachis hypogaea
  source 1..20: mol_type = other DNA
ccgtgattactgactttttt

SEQ ID NO: 1175 - DNA, 20 bp, Arachis hypogaea
  source 1..20: mol_type = other DNA
gattactgacttttttgggt

SEQ ID NO: 1176 - DNA, 20 bp, Arachis hypogaea
  source 1..20: mol_type = other DNA
attactgacttttttgggta

SEQ ID NO: 1177 - DNA, 20 bp, Arachis hypogaea
  source 1..20: mol_type = other DNA
gacttttttgggtagggatc

SEQ ID NO: 1178 - DNA, 20 bp, Arachis hypogaea
  source 1..20: mol_type = other DNA
ttttttgggtagggatctgg

SEQ ID NO: 1179 - DNA, 20 bp, Arachis hypogaea
  source 1..20: mol_type = other DNA
agcttgcccggttttcttta

SEQ ID NO: 1180 - DNA, 20 bp, Arachis hypogaea
  source 1..20: mol_type = other DNA
ggcatcaccataaagaaaac

SEQ ID NO: 1181 - DNA, 20 bp, Arachis hypogaea
  source 1..20: mol_type = other DNA
gcatcaccataaagaaaacc

SEQ ID NO: 1182 - DNA, 20 bp, Arachis hypogaea
  source 1..20: mol_type = other DNA
gccgaaaactagagcttgcc

SEQ ID NO: 1183 - DNA, 20 bp, Arachis hypogaea
  source 1..20: mol_type = other DNA
accgggcaagctctagtttt

SEQ ID NO: 1184 - DNA, 20 bp, Arachis hypogaea
  source 1..20: mol_type = other DNA
tctagttttcggcgtctatg

SEQ ID NO: 1185 - DNA, 20 bp, Arachis hypogaea
  source 1..20: mol_type = other DNA
ttgcattgtccaggagtaac

SEQ ID NO: 1186 - DNA, 20 bp, Arachis hypogaea
  source 1..20: mol_type = other DNA
tatgaggaaccagttactcc

SEQ ID NO: 1187 - DNA, 20 bp, Arachis hypogaea
  source 1..20: mol_type = other DNA
acaaccatgttgcattgtcc

SEQ ID NO: 1188 - DNA, 20 bp, Arachis hypogaea
  source 1..20: mol_type = other DNA
tactcctggacaatgcaaca

SEQ ID NO: 1189 - DNA, 20 bp, Arachis hypogaea
  source 1..20: mol_type = other DNA
aatgcaacatggttgttgag

SEQ ID NO: 1190 - DNA, 20 bp, Arachis hypogaea
  source 1..20: mol_type = other DNA
caacatggttgttgagaggt

SEQ ID NO: 1191 - DNA, 20 bp, Arachis hypogaea
  source 1..20: mol_type = other DNA
aacatggttgttgagaggtt

SEQ ID NO: 1192 - DNA, 20 bp, Arachis hypogaea
  source 1..20: mol_type = other DNA
tctacagaccctgatcaacg

SEQ ID NO: 1193 - DNA, 20 bp, Arachis hypogaea
  source 1..20: mol_type = other DNA
gggagattacctcgttgatc

SEQ ID NO: 1194 - DNA, 20 bp, Arachis hypogaea
  source 1..20: mol_type = other DNA
ggagattacctcgttgatca

SEQ ID NO: 1195 - DNA, 20 bp, Arachis hypogaea
  source 1..20: mol_type = other DNA
tcagggtctgtagatgaacc

SEQ ID NO: 1196 - DNA, 20 bp, Arachis hypogaea
  source 1..20: mol_type = other DNA
gttcaaatcttcaaagatcc

SEQ ID NO: 1197 - DNA, 20 bp, Arachis hypogaea
  source 1..20: mol_type = other DNA
agatttgaacaatttttgtt

SEQ ID NO: 1198 - DNA, 20 bp, Arachis hypogaea
  source 1..20: mol_type = other DNA
gatttgaacaatttttgttt

SEQ ID NO: 1199 - DNA, 20 bp, Arachis hypogaea
  source 1..20: mol_type = other DNA
ctttttattatattcagttt

SEQ ID NO: 1200 - DNA, 20 bp, Arachis hypogaea
  source 1..20: mol_type = other DNA
tctacatttcaaccctaaat

SEQ ID NO: 1201 - DNA, 20 bp, Arachis hypogaea
  source 1..20: mol_type = other DNA
ctacatttcaaccctaaatt

SEQ ID NO: 1202 - DNA, 20 bp, Arachis hypogaea
  source 1..20: mol_type = other DNA
ctgcgacaacacccaattta

SEQ ID NO: 1203 - DNA, 20 bp, Arachis hypogaea
  source 1..20: mol_type = other DNA
tctgcgacaacacccaattt

SEQ ID NO: 1204 - DNA, 20 bp, Arachis hypogaea
  source 1..20: mol_type = other DNA
tcgcagacaataaccatttg

SEQ ID NO: 1205 - DNA, 20 bp, Arachis hypogaea
  source 1..20: mol_type = other DNA
taaactgtttaatcctcaaa

SEQ ID NO: 1206 - DNA, 20 bp, Arachis hypogaea
  source 1..20: mol_type = other DNA
ttaaacagtttatttcttgt

SEQ ID NO: 1207 - DNA, 20 bp, Arachis hypogaea
  source 1..20: mol_type = other DNA
gctcataacagtacaggata

SEQ ID NO: 1208 - DNA, 20 bp, Arachis hypogaea
  source 1..20: mol_type = other DNA
tgtagtgctcataacagtac

SEQ ID NO: 1209 - DNA, 20 bp, Arachis hypogaea
  source 1..20: mol_type = other DNA
tgttatgagcactacatgag

SEQ ID NO: 1210 - DNA, 20 bp, Arachis hypogaea
  source 1..20: mol_type = other DNA
tcatgattatcatacattat

SEQ ID NO: 1211 - DNA, 20 bp, Arachis hypogaea
  source 1..20: mol_type = other DNA
tcatgatttgcgtcctaagc

SEQ ID NO: 1212 - DNA, 20 bp, Arachis hypogaea
  source 1..20: mol_type = other DNA
tgcaaaattaagtcctgctt

SEQ ID NO: 1213 - DNA, 20 bp, Arachis hypogaea
  source 1..20: mol_type = other DNA
attttgcaacatcctgaagt

SEQ ID NO: 1214 - DNA, 20 bp, Arachis hypogaea
  source 1..20: mol_type = other DNA
agttcaatctttccaacttc

SEQ ID NO: 1215 - DNA, 20 bp, Arachis hypogaea
  source 1..20: mol_type = other DNA
gtaatcactgcattaatatg

SEQ ID NO: 1216 - DNA, 20 bp, Arachis hypogaea
  source 1..20: mol_type = other DNA
ttttgtctgaattactgaat

SEQ ID NO: 1217 - DNA, 20 bp, Arachis hypogaea
  source 1..20: mol_type = other DNA
tttgtctgaattactgaatt

SEQ ID NO: 1218 - DNA, 20 bp, Arachis hypogaea
  source 1..20: mol_type = other DNA
acatttctaattcaaaataa

SEQ ID NO: 1219 - DNA, 20 bp, Arachis hypogaea
  source 1..20: mol_type = other DNA
attattttgaattagaaatg

SEQ ID NO: 1220 - DNA, 20 bp, Arachis hypogaea
  source 1..20: mol_type = other DNA
tgtggtatttcgagcaaaaa

SEQ ID NO: 1221 - DNA, 20 bp, Arachis hypogaea
  source 1..20: mol_type = other DNA
ttcttcggtggaaaattaac

SEQ ID NO: 1222 - DNA, 20 bp, Arachis hypogaea
  source 1..20: mol_type = other DNA
tgtacattctaattcttcgg

SEQ ID NO: 1223 - DNA, 20 bp, Arachis hypogaea
  source 1..20: mol_type = other DNA
gtttgtacattctaattctt

SEQ ID NO: 1224 - DNA, 20 bp, Arachis hypogaea
  source 1..20: mol_type = other DNA
tttcattccacgcttctaaa

SEQ ID NO: 1225 - DNA, 20 bp, Arachis hypogaea
  source 1..20: mol_type = other DNA
gtacaaaccttttagaagcg

SEQ ID NO: 1226 - DNA, 20 bp, Arachis hypogaea
  source 1..20: mol_type = other DNA
aaatgcataatcaataatta

SEQ ID NO: 1227 - DNA, 20 bp, Arachis hypogaea
  source 1..20: mol_type = other DNA
aacaagacaatatagtgttt

SEQ ID NO: 1228 - DNA, 20 bp, Arachis hypogaea
  source 1..20: mol_type = other DNA
attgaggaagtgcaagttta

SEQ ID NO: 1229 - DNA, 20 bp, Arachis hypogaea
  source 1..20: mol_type = other DNA
gattgaggaagtgcaagttt

SEQ ID NO: 1230 - DNA, 20 bp, Arachis hypogaea
  source 1..20: mol_type = other DNA
ccctctgccctctaggattg

SEQ ID NO: 1231 - DNA, 20 bp, Arachis hypogaea
  source 1..20: mol_type = other DNA
ttgcacttcctcaatcctag

SEQ ID NO: 1232 - DNA, 20 bp, Arachis hypogaea
  source 1..20: mol_type = other DNA
tgcacttcctcaatcctaga

SEQ ID NO: 1233 - DNA, 20 bp, Arachis hypogaea
  source 1..20: mol_type = other DNA
aagtgcaccctctgccctct

SEQ ID NO: 1234 - DNA, 20 bp, Arachis hypogaea
  source 1..20: mol_type = other DNA
tcctcaatcctagagggcag

SEQ ID NO: 1235 - DNA, 20 bp, Arachis hypogaea
  source 1..20: mol_type = other DNA
cctcaatcctagagggcaga

SEQ ID NO: 1236 - DNA, 20 bp, Arachis hypogaea
  source 1..20: mol_type = other DNA
acaaaaatacataaaaataa

SEQ ID NO: 1237 - DNA, 20 bp, Arachis hypogaea
  source 1..20: mol_type = other DNA
aatttttaacaaattgatag

SEQ ID NO: 1238 - DNA, 20 bp, Arachis hypogaea
  source 1..20: mol_type = other DNA
gtggttcgattctaatgatt

SEQ ID NO: 1239 - DNA, 20 bp, Arachis hypogaea
  source 1..20: mol_type = other DNA
tggttcgattctaatgattt

SEQ ID NO: 1240 - DNA, 20 bp, Arachis hypogaea
  source 1..20: mol_type = other DNA
gatacatacaaaagaggagt

SEQ ID NO: 1241 - DNA, 20 bp, Arachis hypogaea
  source 1..20: mol_type = other DNA
aaaattgatacatacaaaag

SEQ ID NO: 1242 - DNA, 20 bp, Arachis hypogaea
  source 1..20: mol_type = other DNA
tcaaagtgtcttcgattaga

SEQ ID NO: 1243 - DNA, 20 bp, Arachis hypogaea
  source 1..20: mol_type = other DNA
caaagtgtcttcgattagac

SEQ ID NO: 1244 - DNA, 20 bp, Arachis hypogaea
  source 1..20: mol_type = other DNA
aaattttgacgcaatctttt

SEQ ID NO: 1245 - DNA, 20 bp, Arachis hypogaea
  source 1..20: mol_type = other DNA
agctataaaatatcctcgac

SEQ ID NO: 1246 - DNA, 20 bp, Arachis hypogaea
  source 1..20: mol_type = other DNA
aaacccctttgatccagtcg

SEQ ID NO: 1247 - DNA, 20 bp, Arachis hypogaea
  source 1..20: mol_type = other DNA
aatatcctcgactggatcaa

SEQ ID NO: 1248 - DNA, 20 bp, Arachis hypogaea
  source 1..20: mol_type = other DNA
atatcctcgactggatcaaa

SEQ ID NO: 1249 - DNA, 20 bp, Arachis hypogaea
  source 1..20: mol_type = other DNA
tatcctcgactggatcaaag

SEQ ID NO: 1250 - DNA, 20 bp, Arachis hypogaea
  source 1..20: mol_type = other DNA
ggttttgacataaaacttaa

SEQ ID NO: 1251 - DNA, 20 bp, Arachis hypogaea
  source 1..20: mol_type = other DNA
taaaggtgtgaaatataaat

SEQ ID NO: 1252 - DNA, 20 bp, Arachis hypogaea
  source 1..20: mol_type = other DNA
ttcaagtaaatttatctttc

SEQ ID NO: 1253 - DNA, 20 bp, Arachis hypogaea
  source 1..20: mol_type = other DNA
tacgtaaagataaactgaga

SEQ ID NO: 1254 - DNA, 20 bp, Arachis hypogaea
  source 1..20: mol_type = other DNA
aaactgagaaggtaaaatta

SEQ ID NO: 1255 - DNA, 20 bp, Arachis hypogaea
  source 1..20: mol_type = other DNA
gatcgagtctcttttctgca

SEQ ID NO: 1256 - DNA, 20 bp, Arachis hypogaea
  source 1..20: mol_type = other DNA
cgatcgagtctcttttctgc

SEQ ID NO: 1257 - DNA, 20 bp, Arachis hypogaea
  source 1..20: mol_type = other DNA
agtattgtgtaattaatgat

SEQ ID NO: 1258 - DNA, 20 bp, Arachis hypogaea
  source 1..20: mol_type = other DNA
tgtcttgtgcacgcactttc

SEQ ID NO: 1259 - DNA, 20 bp, Arachis hypogaea
  source 1..20: mol_type = other DNA
tattggcaaatgagtgaaaa

SEQ ID NO: 1260 - DNA, 20 bp, Arachis hypogaea
  source 1..20: mol_type = other DNA
attaatgggtaaaattttat

SEQ ID NO: 1261 - DNA, 20 bp, Arachis hypogaea
  source 1..20: mol_type = other DNA
gtaccatgtaaagaattaat

SEQ ID NO: 1262 - DNA, 20 bp, Arachis hypogaea
  source 1..20: mol_type = other DNA
tgtaccatgtaaagaattaa

SEQ ID NO: 1263 - DNA, 20 bp, Arachis hypogaea
  source 1..20: mol_type = other DNA
ttacccattaattctttaca

SEQ ID NO: 1264 - DNA, 20 bp, Arachis hypogaea
  source 1..20: mol_type = other DNA
tacataagtggaggagttga

SEQ ID NO: 1265 - DNA, 20 bp, Arachis hypogaea
  source 1..20: mol_type = other DNA
ttacataagtggaggagttg

SEQ ID NO: 1266 - DNA, 20 bp, Arachis hypogaea
  source 1..20: mol_type = other DNA
tccaacgattacataagtgg

SEQ ID NO: 1267 - DNA, 20 bp, Arachis hypogaea
  source 1..20: mol_type = other DNA
gaatccaacgattacataag

SEQ ID NO: 1268 - DNA, 20 bp, Arachis hypogaea
  source 1..20: mol_type = other DNA
tcctccacttatgtaatcgt

SEQ ID NO: 1269 - DNA, 20 bp, Arachis hypogaea
  source 1..20: mol_type = other DNA
attgagtgggtttaatagaa

SEQ ID NO: 1270 - DNA, 20 bp, Arachis hypogaea
  source 1..20: mol_type = other DNA
gacccgttattaaattgagt

SEQ ID NO: 1271 - DNA, 20 bp, Arachis hypogaea
  source 1..20: mol_type = other DNA
ggacccgttattaaattgag

SEQ ID NO: 1272 - DNA, 20 bp, Arachis hypogaea
  source 1..20: mol_type = other DNA
aaacccactcaatttaataa

SEQ ID NO: 1273 - DNA, 20 bp, Arachis hypogaea
  source 1..20: mol_type = other DNA
aacccactcaatttaataac

SEQ ID NO: 1274 - DNA, 20 bp, Arachis hypogaea
  source 1..20: mol_type = other DNA
attcaatacaagttcgattt

SEQ ID NO: 1275 - DNA, 20 bp, Arachis hypogaea
  source 1..20: mol_type = other DNA
gaaatatttgaaagtgcaca

SEQ ID NO: 1276 - DNA, 20 bp, Arachis hypogaea
  source 1..20: mol_type = other DNA
tggtcgaaaaatatttagat

SEQ ID NO: 1277 - DNA, 20 bp, Arachis hypogaea
  source 1..20: mol_type = other DNA
ctaaatatttttcgaccaac

SEQ ID NO: 1278 - DNA, 20 bp, Arachis hypogaea
  source 1..20: mol_type = other DNA
aagggaaatgatactcctgt

SEQ ID NO: 1279 - DNA, 20 bp, Arachis hypogaea
  source 1..20: mol_type = other DNA
tccatttttttgcatagaaa

SEQ ID NO: 1280 - DNA, 20 bp, Arachis hypogaea
  source 1..20: mol_type = other DNA
gtccatttttttgcatagaa

SEQ ID NO: 1281 - DNA, 20 bp, Arachis hypogaea
  source 1..20: mol_type = other DNA
tccctttctatgcaaaaaaa

SEQ ID NO: 1282 - DNA, 20 bp, Arachis hypogaea
  source 1..20: mol_type = other DNA
cactattttttaattatgaa

SEQ ID NO: 1283 - DNA, 20 bp, Arachis hypogaea
  source 1..20: mol_type = other DNA
tcaatttacataaaaaagag

SEQ ID NO: 1284 - DNA, 20 bp, Arachis hypogaea
  source 1..20: mol_type = other DNA
ttcaatggaaattcgtgtag

SEQ ID NO: 1285 - DNA, 20 bp, Arachis hypogaea
  source 1..20: mol_type = other DNA
acttatatgtcatatttcaa

SEQ ID NO: 1286 - DNA, 20 bp, Arachis hypogaea
  source 1..20: mol_type = other DNA
aaatatgacatataagtaaa

SEQ ID NO: 1287 - DNA, 20 bp, Arachis hypogaea
  source 1..20: mol_type = other DNA
aatatgacatataagtaaaa

SEQ ID NO: 1288 - DNA, 20 bp, Arachis hypogaea
  source 1..20: mol_type = other DNA
aagtaaaagggtaaaaaagc

SEQ ID NO: 1289 - DNA, 20 bp, Arachis hypogaea
  source 1..20: mol_type = other DNA
aatcatttcatcaggtcatc

SEQ ID NO: 1290 - DNA, 20 bp, Arachis hypogaea
  source 1..20: mol_type = other DNA
ctagatttaatcatttcatc

SEQ ID NO: 1291 - DNA, 20 bp, Arachis hypogaea
  source 1..20: mol_type = other DNA
tcatacgtatttatctctga

SEQ ID NO: 1292 - DNA, 20 bp, Arachis hypogaea
  source 1..20: mol_type = other DNA
atttaatcatataaatcaac

SEQ ID NO: 1293 - DNA, 20 bp, Arachis hypogaea
  source 1..20: mol_type = other DNA
taaaatcacaaaacacacaa

SEQ ID NO: 1294 - DNA, 20 bp, Arachis hypogaea
  source 1..20: mol_type = other DNA
ttaaaaataaagtaaaaatt

SEQ ID NO: 1295 - DNA, 20 bp, Arachis hypogaea
  source 1..20: mol_type = other DNA
ataagaaaagaaaattgaaa

SEQ ID NO: 1296 - DNA, 20 bp, Arachis hypogaea
  source 1..20: mol_type = other DNA
aaacgacacttttgtttgaa

SEQ ID NO: 1297 - DNA, 20 bp, Arachis hypogaea
  source 1..20: mol_type = other DNA
tttgaaaggagtcaagtcta

SEQ ID NO: 1298 - DNA, 20 bp, Arachis hypogaea
  source 1..20: mol_type = other DNA
ctaaggagtagcgaatattt

SEQ ID NO: 1299 - DNA, 20 bp, Arachis hypogaea
  source 1..20: mol_type = other DNA
taaggagtagcgaatattta

SEQ ID NO: 1300 - DNA, 20 bp, Arachis hypogaea
  source 1..20: mol_type = other DNA
aaggagtagcgaatatttag

SEQ ID NO: 1301 - DNA, 20 bp, Arachis hypogaea
  source 1..20: mol_type = other DNA
aggagtagcgaatatttagg

SEQ ID NO: 1302 - DNA, 20 bp, Arachis hypogaea
  source 1..20: mol_type = other DNA
agcgaatatttagggggaat

SEQ ID NO: 1303 - DNA, 20 bp, Arachis hypogaea
  source 1..20: mol_type = other DNA
gggggaattggtaatgaaaa

SEQ ID NO: 1304 - DNA, 20 bp, Arachis hypogaea
  source 1..20: mol_type = other DNA
atgaaaatggcaaaaagtac

SEQ ID NO: 1305 - DNA, 20 bp, Arachis hypogaea
  source 1..20: mol_type = other DNA
aaaaagtactggtaatgaca

SEQ ID NO: 1306 - DNA, 20 bp, Arachis hypogaea
  source 1..20: mol_type = other DNA
aaaagtactggtaatgacaa

SEQ ID NO: 1307 - DNA, 20 bp, Arachis hypogaea
  source 1..20: mol_type = other DNA
cattctagtaattcaacgtg

SEQ ID NO: 1308 - DNA, 20 bp, Arachis hypogaea
  source 1..20: mol_type = other DNA
gtgaggacaatatcaacgta

SEQ ID NO: 1309 - DNA, 20 bp, Arachis hypogaea
  source 1..20: mol_type = other DNA
ggattttttttatagctccg

SEQ ID NO: 1310 - DNA, 20 bp, Arachis hypogaea
  source 1..20: mol_type = other DNA
atgctgtagcgttgaaacca

SEQ ID NO: 1311 - DNA, 20 bp, Arachis hypogaea
  source 1..20: mol_type = other DNA
attagtactcaaattttctc

SEQ ID NO: 1312 - DNA, 20 bp, Arachis hypogaea
  source 1..20: mol_type = other DNA
tttctctttctctggaagtt

SEQ ID NO: 1313 - DNA, 20 bp, Arachis hypogaea
  source 1..20: mol_type = other DNA
ttttctctttctctggaagt

SEQ ID NO: 1314 - DNA, 20 bp, Arachis hypogaea
  source 1..20: mol_type = other DNA
catcttgttttctctttctc

SEQ ID NO: 1315 - DNA, 20 bp, Arachis hypogaea
  source 1..20: mol_type = other DNA
aaagagaaaacaagatgtcg

SEQ ID NO: 1316 - DNA, 20 bp, Arachis hypogaea
  source 1..20: mol_type = other DNA
gagaaggtggtcatcgacgt

SEQ ID NO: 1317 - DNA, 20 bp, Arachis hypogaea
  source 1..20: mol_type = other DNA
cttcaatttcgcagagaagg

SEQ ID NO: 1318 - DNA, 20 bp, Arachis hypogaea
  source 1..20: mol_type = other DNA
tgccttcaatttcgcagaga

SEQ ID NO: 1319 - DNA, 20 bp, Arachis hypogaea
  source 1..20: mol_type = other DNA
caccttctctgcgaaattga

SEQ ID NO: 1320 - DNA, 20 bp, Arachis hypogaea
  source 1..20: mol_type = other DNA
ggattgcggcggaggagagg

SEQ ID NO: 1321 - DNA, 20 bp, Arachis hypogaea
  source 1..20: mol_type = other DNA
cgaggattgcggcggaggag

SEQ ID NO: 1322 - DNA, 20 bp, Arachis hypogaea
  source 1..20: mol_type = other DNA
ttggccgaggattgcggcgg

SEQ ID NO: 1323 - DNA, 20 bp, Arachis hypogaea
  source 1..20: mol_type = other DNA
gtcttggccgaggattgcgg

SEQ ID NO: 1324 - DNA, 20 bp, Arachis hypogaea
  source 1..20: mol_type = other DNA
gccgtcttggccgaggattg

SEQ ID NO: 1325 - DNA, 20 bp, Arachis hypogaea
  source 1..20: mol_type = other DNA
ctctcctccgccgcaatcct

SEQ ID NO: 1326 - DNA, 20 bp, Arachis hypogaea
  source 1..20: mol_type = other DNA
aaacactgccgtcttggccg

SEQ ID NO: 1327 - DNA, 20 bp, Arachis hypogaea
  source 1..20: mol_type = other DNA
gccgcaatcctcggccaaga

SEQ ID NO: 1328 - DNA, 20 bp, Arachis hypogaea
  source 1..20: mol_type = other DNA
gagcccaaacactgccgtct

SEQ ID NO: 1329 - DNA, 20 bp, Arachis hypogaea
  source 1..20: mol_type = other DNA
tcggccaagacggcagtgtt

SEQ ID NO: 1330 - DNA, 20 bp, Arachis hypogaea
  source 1..20: mol_type = other DNA
cggccaagacggcagtgttt

SEQ ID NO: 1331 - DNA, 20 bp, Arachis hypogaea
  source 1..20: mol_type = other DNA
tcagagctctaatttccctc

SEQ ID NO: 1332 - DNA, 20 bp, Arachis hypogaea
  source 1..20: mol_type = other DNA
aagtattaaagataacctga

SEQ ID NO: 1333 - DNA, 20 bp, Arachis hypogaea
  source 1..20: mol_type = other DNA
gaagtattaaagataacctg

SEQ ID NO: 1334 - DNA, 20 bp, Arachis hypogaea
  source 1..20: mol_type = other DNA
agaaagaagaaggagagttt

SEQ ID NO: 1335 - DNA, 20 bp, Arachis hypogaea
  source 1..20: mol_type = other DNA
caaagaactaagaaagaaga

SEQ ID NO: 1336 - DNA, 20 bp, Arachis hypogaea
  source 1..20: mol_type = other DNA
aaaaaagaacgagaagaatc

SEQ ID NO: 1337 - DNA, 20 bp, Arachis hypogaea
  source 1..20: mol_type = other DNA
aaatcggaggaaaattaacg

SEQ ID NO: 1338 - DNA, 20 bp, Arachis hypogaea
  source 1..20: mol_type = other DNA
taaatcggaggaaaattaac

SEQ ID NO: 1339 - DNA, 20 bp, Arachis hypogaea
  source 1..20: mol_type = other DNA
ataaatcggaggaaaattaa

SEQ ID NO: 1340 - DNA, 20 bp, Arachis hypogaea
  source 1..20: mol_type = other DNA
aatcaaatctgataaatcgg

SEQ ID NO: 1341 - DNA, 20 bp, Arachis hypogaea
  source 1..20: mol_type = other DNA
gcaaatcaaatctgataaat

SEQ ID NO: 1342 - DNA, 20 bp, Arachis hypogaea
  source 1..20: mol_type = other DNA
tttgcatgagacatatccta

SEQ ID NO: 1343 - DNA, 20 bp, Arachis hypogaea
  source 1..20: mol_type = other DNA
caaattaacaccaaaaccat

SEQ ID NO: 1344 - DNA, 20 bp, Arachis hypogaea
  source 1..20: mol_type = other DNA
tgagacatatcctatggttt

SEQ ID NO: 1345 - DNA, 20 bp, Arachis hypogaea
  source 1..20: mol_type = other DNA
ttgataaaactaaacagcta

SEQ ID NO: 1346 - DNA, 20 bp, Arachis hypogaea
  source 1..20: mol_type = other DNA
agctgtttagttttatcaac

SEQ ID NO: 1347 - DNA, 20 bp, Arachis hypogaea
  source 1..20: mol_type = other DNA
ttatgctgtaaattaaagct

SEQ ID NO: 1348 - DNA, 3751 bp, Arachis hypogaea
  source 1..3751: mol_type = genomic DNA
gatagttaattttagtagctgattttagtgtacaaataacatttttcttataaaaatcattaaaaaattctcactttgtaatttattttttctcaaaccacatatttattaattatttcaaacaaaaaatctcaaaaaaataaaataaaataaatataaaaaatttatttattaatcattttgtaatttttttcgcaacccacatatttattaatcattttcaatcaaaaaataaaacaaataaataaaaaattcaaaagacataaaaggattctcgtaacactattttatcttacttctttcgtattattaaaaaaaattcatttttcatacaaaaacaatttgaaaaaaaaaaaagcaattaaactcagggttgttgagaacaagaaaaaaaaagagggaaaaaaagaactatgcaatctgcaccaaatttgacgaattttaagggagtttattttaaaaatatgttattttctcaaaaaattctataattttacgtacttgtatatatctcaatttatttattcaataaattcatttaacatactctaattgaactgtaattaaaaataaattttattgtaataaaagttttttaataagtacgaaatatatattgtatatgaagaagtttttttgcaagatataatattttaaaatttctaagatttttagaattttttatatatttttttatcttttgaattttttttttgttgaaaatgattaatagatatatagtttgagaaaaaataaatcataaaatgagatttttttaataatttttataaattataaaaaatatataccatagtcagttaaaacttaaattaaataacaggttaaatttaattttgacaaatcaatttaatttaaccactaatattgtgacatgtaataagaaataagttacaaatgagttacagctcaaatgacataatttttttatagtttaaatttctctatttttgattaaaaaaaaaagagataagttactttttaaaactgagagagtatgccaaaattcactaatttttgaatttctaattttaaaattcaaaaaattagaataataaatttttttttataattttttttaatttttaattagttgattttaattaactatttttctaattagttccttagcagaactgttattcaataccgttattttaatactttaccaattggtattttaaatttcgcttgactgtattaaggctgaattagtgacagtaaatttagaatttttaccggataaaatagtcctttcaattgaaaaaaaagggtacagtggttaatttcggtattataaatataattatttatatatattttttattaataaaatattaaaaaaatttataatatattatcagatattttataattaaaaattaaaatttaattcttttgaataaaaaattaaagcataaaataaataaaaaatatttatacaaaaaatttaaataaatccaaaagaaatttacttaaaagaacatattataatataactattaatccaggattgttagtggcaatttcatgcatttctggcgagaagggaaacgatttttccggtagcagcatggagatggtggcatcaatatttgatggtgttaaggaatataacggatgatgtagttttttccttctattaataataactcataaacagaatagccaatgagttataactcaaatgacatagtcttttcatactcaattaagaggttacgggttcgagtcttttatctttagtaaaaaaaaaaaaaaaactcataaacagaataagctatcatcatttattaacaaatcagtagctggagcatgtcatggattgattaattactcatttcgtattgttgggattttacttgagaaaatatttgataataaaaaaaatcgttaaaaaaataataaaattttatcttatttaatatttattaattattataataatttttttgatgactaattattataataattaataaaataaaataaaatttgattgtttttttatttttttaatattatcgtttaagacataaaaataggaaagaagagagaagttgaagatgtctctttaatgggccatggacattttgttttaattaatcaattacaatttttgttttacatacatgtgtgcttttagcgagtgggttgtcaaatttgtgaaaaataaaagagtcaacgccaatttaaaaaaaaataaaataataaatatttattttgatttttgataatttatttgaataataaaatattttttataatttcaaaattttaaattaatttttaattatttaaataactaatctaaataatttttataaattttgacctgttaatgtatcaataactgcttaaatcaatataaaaaattatttaaactaattatttaattatttagataagagattgattaaaaaattttaaatttgaaaaaattatttatcgttcaagcaaatatttaaagaacaaaaagaatatttactcaataaaaaataaataagttttgaaaacaaaatagacgattaatatattgaagtaaggctaattctatatacttattatttaatgtttaaattttgtctactttattttttataataaattttaaatatttaaaatttactaatttatatacttttaaaataaatatcaattttttttttcagaagatatcaaatttttaggcaccataagatcccgatggaagaaattggctgttgtaaatatctgtgtttactgaaggtgcattgaacatcatcatcttcattgatcatatagcacataataataattactacagcaaagcctgacatgctgattaaggaaaaacaaatgggaatcttggagtatttgcatgcatgaaaatgtaacgtggaagcacaaaagcaatgaatgaagcaaacaaagccacaccaccctccattccctttacacgtacctcacatactaagccctgtttcccctataaatacccctgctgccaccatcaacactactcataaaaaagtcacacacaactaaaacactactcctcaagcatcatcacattccaccaccaccatggccaagtccaccatcctggtagctctccttgccctcgtcctggtggcacacgcctccgcaatgaggcgcgagagggggagacagggggactcatcaagctgcgagaggcaggtagacagggttaacctcaagccctgcgagcagcacataatgcagaggatcatgggcgagcaagagcagtacgactcctacgatattaggagtactcgatcctccgaccagcaacagaggtgctgcgatgagctgaacgagatggagaacacacagagatgcatgtgcgaggcattgcagcagataatggagaaccagtgcgataggttgcaggacaggcaaatggtgcagcagttcaagagagagctcatgaacttgccccaacagtgtaactttagggcaccacagcgttgcgatttggacgtgagtggcggcagatgctagactcaaaaataataatctgtgccaaaacaaactagtaggaagtagcttatattatgagctattatgtatgcttgtttcgttaataataaatatcatcactgtatgaatgtggtgataggtaaggttatatgagcaccttcggtgtgctcttatggctttacctatgttttgctactgcaaagttttaaccaccatgaaataaaagatcttcaagtatattatgttttaa

SEQ ID NO: 1349 - protein, 145 aa, Arachis hypogaea
MAKSTILVALLALVLVAHASAMRRERGRQGDSSSCERQVDRVNLKPCEQHIMQRIMGEQEQYDSYDIRSTRSSDQQQRCCDELNEMENTQRCMCEALQQIMENQCDRLQDRQMVQQFKRELMNLPQQCNFRAPQRCDLDVSGGRC

SEQ ID NO: 1350 - DNA, 20 bp, Arachis hypogaea
  source 1..20: mol_type = other DNA
tgaaataattaataaatatg

SEQ ID NO: 1351 - DNA, 20 bp, Arachis hypogaea
  source 1..20: mol_type = other DNA
aaaatgattaataaatatgt

SEQ ID NO: 1352 - DNA, 20 bp, Arachis hypogaea
  source 1..20: mol_type = other DNA
gaaaatgattaataaatatg

SEQ ID NO: 1353 - DNA, 20 bp, Arachis hypogaea
  source 1..20: mol_type = other DNA
aaaaattcaaaagacataaa

SEQ ID NO: 1354 - DNA, 20 bp, Arachis hypogaea
  source 1..20: mol_type = other DNA
aaaaaaaagcaattaaactc

SEQ ID NO: 1355 - DNA, 20 bp, Arachis hypogaea
  source 1..20: mol_type = other DNA
aaaaaaagcaattaaactca

SEQ ID NO: 1356 - DNA, 20 bp, Arachis hypogaea
  source 1..20: mol_type = other DNA
tgagaacaagaaaaaaaaag

SEQ ID NO: 1357 - DNA, 20 bp, Arachis hypogaea
  source 1..20: mol_type = other DNA
gagaacaagaaaaaaaaaga

SEQ ID NO: 1358 - DNA, 20 bp, Arachis hypogaea
  source 1..20: mol_type = other DNA
cccttaaaattcgtcaaatt

SEQ ID NO: 1359 - DNA, 20 bp, Arachis hypogaea
  source 1..20: mol_type = other DNA
accaaatttgacgaatttta

SEQ ID NO: 1360 - DNA, 20 bp, Arachis hypogaea
  source 1..20: mol_type = other DNA
ccaaatttgacgaattttaa

SEQ ID NO: 1361 - DNA, 20 bp, Arachis hypogaea
  source 1..20: mol_type = other DNA
atttaagttttaactgacta

SEQ ID NO: 1362 - DNA, 20 bp, Arachis hypogaea
  source 1..20: mol_type = other DNA
taaaacttaaattaaataac

SEQ ID NO: 1363 - DNA, 20 bp, Arachis hypogaea
  source 1..20: mol_type = other DNA
attacatgtcacaatattag

SEQ ID NO: 1364 - DNA, 20 bp, Arachis hypogaea
  source 1..20: mol_type = other DNA
attcaaaaattagtgaattt

SEQ ID NO: 1365 - DNA, 20 bp, Arachis hypogaea
  source 1..20: mol_type = other DNA
attgaataacagttctgcta

SEQ ID NO: 1366 - DNA, 20 bp, Arachis hypogaea
  source 1..20: mol_type = other DNA
ttggtaaagtattaaaataa

SEQ ID NO: 1367 - DNA, 20 bp, Arachis hypogaea
  source 1..20: mol_type = other DNA
tattttaatactttaccaat

SEQ ID NO: 1368 - DNA, 20 bp, Arachis hypogaea
  source 1..20: mol_type = other DNA
gcgaaatttaaaataccaat

SEQ ID NO: 1369 - DNA, 20 bp, Arachis hypogaea
  source 1..20: mol_type = other DNA
aatttcgcttgactgtatta

SEQ ID NO: 1370 - DNA, 20 bp, Arachis hypogaea
  source 1..20: mol_type = other DNA
agtaaatttagaatttttac

SEQ ID NO: 1371 - DNA, 20 bp, Arachis hypogaea
  source 1..20: mol_type = other DNA
attgaaaggactattttatc

SEQ ID NO: 1372 - DNA, 20 bp, Arachis hypogaea
  source 1..20: mol_type = other DNA
acccttttttttcaattgaa

SEQ ID NO: 1373 - DNA, 20 bp, Arachis hypogaea
  source 1..20: mol_type = other DNA
gtcctttcaattgaaaaaaa

SEQ ID NO: 1374 - DNA, 20 bp, Arachis hypogaea
  source 1..20: mol_type = other DNA
tcctttcaattgaaaaaaaa

SEQ ID NO: 1375 - DNA, 20 bp, Arachis hypogaea
  source 1..20: mol_type = other DNA
attgaaaaaaaagggtacag

SEQ ID NO: 1376 - DNA, 20 bp, Arachis hypogaea
  source 1..20: mol_type = other DNA
aagggtacagtggttaattt

SEQ ID NO: 1377 - DNA, 20 bp, Arachis hypogaea
  source 1..20: mol_type = other DNA
tcttttaagtaaatttcttt

SEQ ID NO: 1378 - DNA, 20 bp, Arachis hypogaea
  source 1..20: mol_type = other DNA
tataatataactattaatcc

SEQ ID NO: 1379 - DNA, 20 bp, Arachis hypogaea
  source 1..20: mol_type = other DNA
gaaattgccactaacaatcc

SEQ ID NO: 1380 - DNA, 20 bp, Arachis hypogaea
  source 1..20: mol_type = other DNA
tattaatccaggattgttag

SEQ ID NO: 1381 - DNA, 20 bp, Arachis hypogaea
  source 1..20: mol_type = other DNA
gtggcaatttcatgcatttc

SEQ ID NO: 1382 - DNA, 20 bp, Arachis hypogaea
  source 1..20: mol_type = other DNA
ttcatgcatttctggcgaga

SEQ ID NO: 1383 - DNA, 20 bp, Arachis hypogaea
  source 1..20: mol_type = other DNA
tcatgcatttctggcgagaa

SEQ ID NO: 1384 - DNA, 20 bp, Arachis hypogaea
  source 1..20: mol_type = other DNA
gagaagggaaacgatttttc

SEQ ID NO: 1385 - DNA, 20 bp, Arachis hypogaea
  source 1..20: mol_type = other DNA
caccatctccatgctgctac

SEQ ID NO: 1386 - DNA, 20 bp, Arachis hypogaea
  source 1..20: mol_type = other DNA
cgatttttccggtagcagca

SEQ ID NO: 1387 - DNA, 20 bp, Arachis hypogaea
  source 1..20: mol_type = other DNA
ttccggtagcagcatggaga

SEQ ID NO: 1388 - DNA, 20 bp, Arachis hypogaea
  source 1..20: mol_type = other DNA
cggtagcagcatggagatgg

SEQ ID NO: 1389 - DNA, 20 bp, Arachis hypogaea
  source 1..20: mol_type = other DNA
atggtggcatcaatatttga

SEQ ID NO: 1390 - DNA, 20 bp, Arachis hypogaea
  source 1..20: mol_type = other DNA
atcaatatttgatggtgtta

SEQ ID NO: 1391 - DNA, 20 bp, Arachis hypogaea
  source 1..20: mol_type = other DNA
gatggtgttaaggaatataa

SEQ ID NO: 1392 - DNA, 20 bp, Arachis hypogaea
  source 1..20: mol_type = other DNA
tatgagttattattaataga

SEQ ID NO: 1393 - DNA, 20 bp, Arachis hypogaea
  source 1..20: mol_type = other DNA
tcatttgagttataactcat

SEQ ID NO: 1394 - DNA, 20 bp, Arachis hypogaea
  source 1..20: mol_type = other DNA
tcttttcatactcaattaag

SEQ ID NO: 1395 - DNA, 20 bp, Arachis hypogaea
  source 1..20: mol_type = other DNA
catactcaattaagaggtta

SEQ ID NO: 1396 - DNA, 20 bp, Arachis hypogaea
  source 1..20: mol_type = other DNA
atactcaattaagaggttac

SEQ ID NO: 1397 - DNA, 20 bp, Arachis hypogaea
  source 1..20: mol_type = other DNA
tttattaacaaatcagtagc

SEQ ID NO: 1398 - DNA, 20 bp, Arachis hypogaea
  source 1..20: mol_type = other DNA
tcagtagctggagcatgtca

SEQ ID NO: 1399 - DNA, 20 bp, Arachis hypogaea
  source 1..20: mol_type = other DNA
aattactcatttcgtattgt

SEQ ID NO: 1400 - DNA, 20 bp, Arachis hypogaea
  source 1..20: mol_type = other DNA
attactcatttcgtattgtt

SEQ ID NO: 1401 - DNA, 20 bp, Arachis hypogaea
  source 1..20: mol_type = other DNA
atcgtttaagacataaaaat

SEQ ID NO: 1402 - DNA, 20 bp, Arachis hypogaea
  source 1..20: mol_type = other DNA
agttgaagatgtctctttaa

SEQ ID NO: 1403 - DNA, 20 bp, Arachis hypogaea
  source 1..20: mol_type = other DNA
gttgaagatgtctctttaat

SEQ ID NO: 1404 - DNA, 20 bp, Arachis hypogaea
  source 1..20: mol_type = other DNA
gatgtctctttaatgggcca

SEQ ID NO: 1405 - DNA, 20 bp, Arachis hypogaea
  source 1..20: mol_type = other DNA
taattaaaacaaaatgtcca

SEQ ID NO: 1406 - DNA, 20 bp, Arachis hypogaea
  source 1..20: mol_type = other DNA
acatgtgtgcttttagcgag

SEQ ID NO: 1407 - DNA, 20 bp, Arachis hypogaea
  source 1..20: mol_type = other DNA
catgtgtgcttttagcgagt

SEQ ID NO: 1408 - DNA, 20 bp, Arachis hypogaea
  source 1..20: mol_type = other DNA
tattttatttttttttaaat

SEQ ID NO: 1409 - DNA, 20 bp, Arachis hypogaea
  source 1..20: mol_type = other DNA
gcagttattgatacattaac

SEQ ID NO: 1410 - DNA, 20 bp, Arachis hypogaea
  source 1..20: mol_type = other DNA
acgattaatatattgaagta

SEQ ID NO: 1411 - DNA, 20 bp, Arachis hypogaea
  source 1..20: mol_type = other DNA
tcagaagatatcaaattttt

SEQ ID NO: 1412 - DNA, 20 bp, Arachis hypogaea
  source 1..20: mol_type = other DNA
tttcttccatcgggatctta

SEQ ID NO: 1413 - DNA, 20 bp, Arachis hypogaea
  source 1..20: mol_type = other DNA
taggcaccataagatcccga

SEQ ID NO: 1414 - DNA, 20 bp, Arachis hypogaea
  source 1..20: mol_type = other DNA
aacagccaatttcttccatc

SEQ ID NO: 1415 - DNA, 20 bp, Arachis hypogaea
  source 1..20: mol_type = other DNA
caacagccaatttcttccat

SEQ ID NO: 1416 - DNA, 20 bp, Arachis hypogaea
  source 1..20: mol_type = other DNA
aagatcccgatggaagaaat

SEQ ID NO: 1417 - DNA, 20 bp, Arachis hypogaea
  source 1..20: mol_type = other DNA
taaatatctgtgtttactga

SEQ ID NO: 1418 - DNA, 20 bp, Arachis hypogaea
  source 1..20: mol_type = other DNA
ttttccttaatcagcatgtc

SEQ ID NO: 1419 - DNA, 20 bp, Arachis hypogaea
  source 1..20: mol_type = other DNA
aaagcctgacatgctgatta

SEQ ID NO: 1420 - DNA, 20 bp, Arachis hypogaea
  source 1..20: mol_type = other DNA
gctgattaaggaaaaacaaa

SEQ ID NO: 1421 - DNA, 20 bp, Arachis hypogaea
  source 1..20: mol_type = other DNA
ctgattaaggaaaaacaaat

SEQ ID NO: 1422 - DNA, 20 bp, Arachis hypogaea
  source 1..20: mol_type = other DNA
ggaaaaacaaatgggaatct

SEQ ID NO: 1423 - DNA, 20 bp, Arachis hypogaea
  source 1..20: mol_type = other DNA
gcatgcatgaaaatgtaacg

SEQ ID NO: 1424 - DNA, 20 bp, Arachis hypogaea
  source 1..20: mol_type = other DNA
aaagggaatggagggtggtg

SEQ ID NO: 1425 - DNA, 20 bp, Arachis hypogaea
  source 1..20: mol_type = other DNA
cgtgtaaagggaatggaggg

SEQ ID NO: 1426 - DNA, 20 bp, Arachis hypogaea
  source 1..20: mol_type = other DNA
gtacgtgtaaagggaatgga

SEQ ID NO: 1427 - DNA, 20 bp, Arachis hypogaea
  source 1..20: mol_type = other DNA
ggtacgtgtaaagggaatgg

SEQ ID NO: 1428 - DNA, 20 bp, Arachis hypogaea
  source 1..20: mol_type = other DNA
tgaggtacgtgtaaagggaa

SEQ ID NO: 1429 - DNA, 20 bp, Arachis hypogaea
  source 1..20: mol_type = other DNA
gtatgtgaggtacgtgtaaa

SEQ ID NO: 1430 - DNA, 20 bp, Arachis hypogaea
  source 1..20: mol_type = other DNA
agtatgtgaggtacgtgtaa

SEQ ID NO: 1431 - DNA, 20 bp, Arachis hypogaea
  source 1..20: mol_type = other DNA
gaaacagggcttagtatgtg

SEQ ID NO: 1432 - DNA, 20 bp, Arachis hypogaea
  source 1..20: mol_type = other DNA
gggtatttataggggaaaca

SEQ ID NO: 1433 - DNA, 20 bp, Arachis hypogaea
  source 1..20: mol_type = other DNA
ggggtatttataggggaaac

SEQ ID NO: 1434 - DNA, 20 bp, Arachis hypogaea
  source 1..20: mol_type = other DNA
ggcagcaggggtatttatag

SEQ ID NO: 1435 - DNA, 20 bp, Arachis hypogaea
  source 1..20: mol_type = other DNA
tggcagcaggggtatttata

SEQ ID NO: 1436 - DNA, 20 bp, Arachis hypogaea
  source 1..20: mol_type = other DNA
gtggcagcaggggtatttat

SEQ ID NO: 1437 - DNA, 20 bp, Arachis hypogaea
  source 1..20: mol_type = other DNA
agtgttgatggtggcagcag

SEQ ID NO: 1438 - DNA, 20 bp, Arachis hypogaea
  source 1..20: mol_type = other DNA
tagtgttgatggtggcagca

SEQ ID NO: 1439 - DNA, 20 bp, Arachis hypogaea
  source 1..20: mol_type = other DNA
gtagtgttgatggtggcagc

SEQ ID NO: 1440 - DNA, 20 bp, Arachis hypogaea
  source 1..20: mol_type = other DNA
tttatgagtagtgttgatgg

SEQ ID NO: 1441 - DNA, 20 bp, Arachis hypogaea
  source 1..20: mol_type = other DNA
ttttttatgagtagtgttga

SEQ ID NO: 1442 - DNA, 20 bp, Arachis hypogaea
  source 1..20: mol_type = other DNA
gtggaatgtgatgatgcttg

SEQ ID NO: 1443 - DNA, 20 bp, Arachis hypogaea
  source 1..20: mol_type = other DNA
ggacttggccatggtggtgg

SEQ ID NO: 1444 - DNA, 20 bp, Arachis hypogaea
  source 1..20: mol_type = other DNA
atcacattccaccaccacca

SEQ ID NO: 1445 - DNA, 20 bp, Arachis hypogaea
  source 1..20: mol_type = other DNA
ggtggacttggccatggtgg

SEQ ID NO: 1446 - DNA, 20 bp, Arachis hypogaea
  source 1..20: mol_type = other DNA
gatggtggacttggccatgg

SEQ ID NO: 1447 - DNA, 20 bp, Arachis hypogaea
  source 1..20: mol_type = other DNA
caggatggtggacttggcca

SEQ ID NO: 1448 - DNA, 20 bp, Arachis hypogaea
  source 1..20: mol_type = other DNA
agctaccaggatggtggact

SEQ ID NO: 1449 - DNA, 20 bp, Arachis hypogaea
  source 1..20: mol_type = other DNA
catggccaagtccaccatcc

SEQ ID NO: 1450 - DNA, 20 bp, Arachis hypogaea
  source 1..20: mol_type = other DNA
aaggagagctaccaggatgg

SEQ ID NO: 1451 - DNA, 20 bp, Arachis hypogaea
  source 1..20: mol_type = other DNA
ggcaaggagagctaccagga

SEQ ID NO: 1452 - DNA, 20 bp, Arachis hypogaea
  source 1..20: mol_type = other DNA
cgagggcaaggagagctacc

SEQ ID NO: 1453 - DNA, 20 bp, Arachis hypogaea
  source 1..20: mol_type = other DNA
gtgccaccaggacgagggca

SEQ ID NO: 1454 - DNA, 20 bp, Arachis hypogaea
  source 1..20: mol_type = other DNA
agctctccttgccctcgtcc

SEQ ID NO: 1455 - DNA, 20 bp, Arachis hypogaea
  source 1..20: mol_type = other DNA
ggcgtgtgccaccaggacga

SEQ ID NO: 1456 - DNA, 20 bp, Arachis hypogaea
  source 1..20: mol_type = other DNA
aggcgtgtgccaccaggacg

SEQ ID NO: 1457 - DNA, 20 bp, Arachis hypogaea
  source 1..20: mol_type = other DNA
tctccttgccctcgtcctgg

SEQ ID NO: 1458 - DNA, 20 bp, Arachis hypogaea
  source 1..20: mol_type = other DNA
ttgcggaggcgtgtgccacc

SEQ ID NO: 1459 - DNA, 20 bp, Arachis hypogaea
  source 1..20: mol_type = other DNA
cctctcgcgcctcattgcgg

SEQ ID NO: 1460 - DNA, 20 bp, Arachis hypogaea
  source 1..20: mol_type = other DNA
tggcacacgcctccgcaatg

SEQ ID NO: 1461 - DNA, 20 bp, Arachis hypogaea
  source 1..20: mol_type = other DNA
ccccctctcgcgcctcattg

SEQ ID NO: 1462 - DNA, 20 bp, Arachis hypogaea
  source 1..20: mol_type = other DNA
cctccgcaatgaggcgcgag

SEQ ID NO: 1463 - DNA, 20 bp, Arachis hypogaea
  source 1..20: mol_type = other DNA
ctccgcaatgaggcgcgaga

SEQ ID NO: 1464 - DNA, 20 bp, Arachis hypogaea
  source 1..20: mol_type = other DNA
tccgcaatgaggcgcgagag

SEQ ID NO: 1465 - DNA, 20 bp, Arachis hypogaea
  source 1..20: mol_type = other DNA
ccgcaatgaggcgcgagagg

SEQ ID NO: 1466 - DNA, 20 bp, Arachis hypogaea
  source 1..20: mol_type = other DNA
gaggcgcgagagggggagac

SEQ ID NO: 1467 - DNA, 20 bp, Arachis hypogaea
  source 1..20: mol_type = other DNA
aggcgcgagagggggagaca

SEQ ID NO: 1468 - DNA, 20 bp, Arachis hypogaea
  source 1..20: mol_type = other DNA
ggcgcgagagggggagacag

SEQ ID NO: 1469 - DNA, 20 bp, Arachis hypogaea
  source 1..20: mol_type = other DNA
gcgcgagagggggagacagg

SEQ ID NO: 1470 - DNA, 20 bp, Arachis hypogaea
  source 1..20: mol_type = other DNA
gggactcatcaagctgcgag

SEQ ID NO: 1471 - DNA, 20 bp, Arachis hypogaea
  source 1..20: mol_type = other DNA
ctcatcaagctgcgagaggc

SEQ ID NO: 1472 - DNA, 20 bp, Arachis hypogaea
  source 1..20: mol_type = other DNA
gctgcgagaggcaggtagac

SEQ ID NO: 1473 - DNA, 20 bp, Arachis hypogaea
  source 1..20: mol_type = other DNA
ctgcgagaggcaggtagaca

SEQ ID NO: 1474 - DNA, 20 bp, Arachis hypogaea
  source 1..20: mol_type = other DNA
tgtgctgctcgcagggcttg

SEQ ID NO: 1475 - DNA, 20 bp, Arachis hypogaea
  source 1..20: mol_type = other DNA
tgcattatgtgctgctcgca

SEQ ID NO: 1476 - DNA, 20 bp, Arachis hypogaea
  source 1..20: mol_type = other DNA
ctgcattatgtgctgctcgc

SEQ ID NO: 1477 - DNA, 20 bp, Arachis hypogaea
  source 1..20: mol_type = other DNA
gcgagcagcacataatgcag

SEQ ID NO: 1478 - DNA, 20 bp, Arachis hypogaea
  source 1..20: mol_type = other DNA
gcacataatgcagaggatca

SEQ ID NO: 1479 - DNA, 20 bp, Arachis hypogaea
  source 1..20: mol_type = other DNA
cacataatgcagaggatcat

SEQ ID NO: 1480 - DNA, 20 bp, Arachis hypogaea
  source 1..20: mol_type = other DNA
tcgagtactcctaatatcgt

SEQ ID NO: 1481 - DNA, 20 bp, Arachis hypogaea
  source 1..20: mol_type = other DNA
agtacgactcctacgatatt

SEQ ID NO: 1482 - DNA, 20 bp, Arachis hypogaea
  source 1..20: mol_type = other DNA
gcacctctgttgctggtcgg

SEQ ID NO: 1483 - DNA, 20 bp, Arachis hypogaea
  source 1..20: mol_type = other DNA
gcagcacctctgttgctggt

SEQ ID NO: 1484 - DNA, 20 bp, Arachis hypogaea
  source 1..20: mol_type = other DNA
catcgcagcacctctgttgc

SEQ ID NO: 1485 - DNA, 20 bp, Arachis hypogaea
  source 1..20: mol_type = other DNA
gatcctccgaccagcaacag

SEQ ID NO: 1486 - DNA, 20 bp, Arachis hypogaea
  source 1..20: mol_type = other DNA
ctgcgatgagctgaacgaga

SEQ ID NO: 1487 - DNA, 20 bp, Arachis hypogaea
  source 1..20: mol_type = other DNA
cacacagagatgcatgtgcg

SEQ ID NO: 1488 - DNA, 20 bp, Arachis hypogaea
  source 1..20: mol_type = other DNA
cgaggcattgcagcagataa

SEQ ID NO: 1489 - DNA, 20 bp, Arachis hypogaea
  source 1..20: mol_type = other DNA
tgtcctgcaacctatcgcac

SEQ ID NO: 1490 - DNA, 20 bp, Arachis hypogaea
  source 1..20: mol_type = other DNA
taatggagaaccagtgcgat

SEQ ID NO: 1491 - DNA, 20 bp, Arachis hypogaea
  source 1..20: mol_type = other DNA
gaaccagtgcgataggttgc

SEQ ID NO: 1492 - DNA, 20 bp, Arachis hypogaea
  source 1..20: mol_type = other DNA
agtgcgataggttgcaggac

SEQ ID NO: 1493 - DNA, 20 bp, Arachis hypogaea
  source 1..20: mol_type = other DNA
taggttgcaggacaggcaaa

SEQ ID NO: 1494 - DNA, 20 bp, Arachis hypogaea
  source 1..20: mol_type = other DNA
gccctaaagttacactgttg

SEQ ID NO: 1495 - DNA, 20 bp, Arachis hypogaea
  source 1..20: mol_type = other DNA
tgccctaaagttacactgtt

SEQ ID NO: 1496 - DNA, 20 bp, Arachis hypogaea
  source 1..20: mol_type = other DNA
gtgccctaaagttacactgt

SEQ ID NO: 1497 - DNA, 20 bp, Arachis hypogaea
  source 1..20: mol_type = other DNA
tgccccaacagtgtaacttt

SEQ ID NO: 1498 - DNA, 20 bp, Arachis hypogaea
  source 1..20: mol_type = other DNA
gccccaacagtgtaacttta

SEQ ID NO: 1499 - DNA, 20 bp, Arachis hypogaea
  source 1..20: mol_type = other DNA
acgtccaaatcgcaacgctg

SEQ ID NO: 1500 - DNA, 20 bp, Arachis hypogaea
  source 1..20: mol_type = other DNA
ggcaccacagcgttgcgatt

SEQ ID NO: 1501 - DNA, 20 bp, Arachis hypogaea
  source 1..20: mol_type = other DNA
cgttgcgatttggacgtgag

SEQ ID NO: 1502 - DNA, 20 bp, Arachis hypogaea
  source 1..20: mol_type = other DNA
tgcgatttggacgtgagtgg

SEQ ID NO: 1503 - DNA, 20 bp, Arachis hypogaea
  source 1..20: mol_type = other DNA
tacttcctactagtttgttt

SEQ ID NO: 1504 - DNA, 20 bp, Arachis hypogaea
  source 1..20: mol_type = other DNA
ctgtgccaaaacaaactagt

SEQ ID NO: 1505 - DNA, 20 bp, Arachis hypogaea
  source 1..20: mol_type = other DNA
atatcatcactgtatgaatg

SEQ ID NO: 1506 - DNA, 20 bp, Arachis hypogaea
  source 1..20: mol_type = other DNA
cactgtatgaatgtggtgat

SEQ ID NO: 1507 - DNA, 20 bp, Arachis hypogaea
  source 1..20: mol_type = other DNA
tatgaatgtggtgataggta

SEQ ID NO: 1508 - DNA, 20 bp, Arachis hypogaea
  source 1..20: mol_type = other DNA
taaggttatatgagcacctt

SEQ ID NO: 1509 - DNA, 20 bp, Arachis hypogaea
  source 1..20: mol_type = other DNA
aagccataagagcacaccga

SEQ ID NO: 1510 - DNA, 20 bp, Arachis hypogaea
  source 1..20: mol_type = other DNA
gcaccttcggtgtgctctta

SEQ ID NO: 1511 - DNA, 20 bp, Arachis hypogaea
  source 1..20: mol_type = other DNA
actttgcagtagcaaaacat

SEQ ID NO: 1512 - DNA, 20 bp, Arachis hypogaea
  source 1..20: mol_type = other DNA
gaagatcttttatttcatgg

SEQ ID NO: 1513 - DNA, 20 bp, Arachis hypogaea
  source 1..20: mol_type = other DNA
cttgaagatcttttatttca

SEQ ID NO: 1514 - DNA, 3831 bp, Arachis hypogaea
  source 1..3831: mol_type = genomic DNA
actccactcgtttttttaaaattaataggaataaattattaaatataatatattttttaaaaaaatttatttaatataaataaaaatttagtctaattaaaatattaataatttttaatatttaaaaaataaataataatattaaaaaattaaaaaagatatattattaatatttattaattaaataaaattttttaaatttcataaaatagatttctttttgtttttgtgaccgtccttcttaattcatttagtattaattttctttgtttcgactgctataattgaaaaatctttttcaattatgaatattgtaaaaaataattcaaaaataaattaaaaataaatttatttgtaattattttttatttatattaaaaaaaactactaaaaaatttgacataaattctattattgataaattttatgatatgaaaaatgaatcactttataaataaaagtacatatattttttatattttaaaatatattctctattagtatatttttataatacatcttatattatataatttttttgtataattttttaatattatatatattattagcctcgtaataatatttctgaatccattctatgagtggtagctagttaccttaaaacataccttactagaattttattttttaaaaaaatacttgatacatcatgtgtttaaaataattctttacaagttggtccaaattttaactaacatttgacatttaatttgatttggacttagtatatatgtatagtaaaggctttaattcctaaagatgggttttggcctcctcatcagtctcttttgtgaagagaaaaggcattacgtcaaaatagtcaccaatcacctcaagatctgtctctatcgttgttatcatacacttatattgagagtgaaaaaacacatataacatattatacagaataaacgcaaaacaaaaaaaaatcacaaagcataacttttattttctttttttatctctatatattttcaatatattagaataaatactcttgtcttgtcctattgtttaattcatcaaaattcaaaagattagacgcatttaggttagtttgaatttgagagaaaaagaaaatcgaactgattaaattttaattagttcaaattgatctgaatttaaattgttttataactgaatccaaatcaatctggattgattaaactcgaattggattagttcagatgattgggtatccaattaaaaataaaattaaaaaaaataaaaaaaataaaaatttctctaaatactataaatatataatataataataaaaaaataatacatcatcgattcaaacttaaataaatttaaataactattattatttggaatactataagattaagagacagttgttgtatgtgtatattattaaatttatttatttattttaattaatattaaattaattgggtaaatgttcaaatttgacaatcccagaatgaataattaagccaattaagattgagtttaattgaatttgatctgattatacctaattatttatttaaattcaaaatcaatataatcaaatttaatcgattttagatgaatgatcatattatccgtaccataatacaaaagactcctacatcttatgttaattgatatatcaaatttattatattctatcaatttttgtacttgcatatctttacacaaatcaatataatttatactcaatctaaaatttatataatgattggcaaaattaaatatgcaaacataatttattatattgtggcagacacatgtttacaggactgaaaaaaatttatttacttaaataaaataaataaaatttatgtttatcatattgttccaaattgaaaaaatatatatatacaaataatattacattattaataaatttttattttttaacaatattacatcaacactttaattaaattttaaatattaaattttatattttaaattttaaattttaaactctcatcttaataatacacaaataaagtgttgataaagtatgaactaatatcattaaaaaagttaattactaaaaacgtctttaaattattctaatgccgacaataataattcttaattttaatatcgataaaaataacttttaataatttaaaaacgtgcataaaatgtctgtaaaaaaaacactccattaataaaaatgtataatgtgacaaacgggatctctccttaatatttcattgtactaattctcaagatctagcattgaacactatattaatttttgaatttttttgatgtggaattaatgaacgaaatattaaaatagatttaacttattatgctagacagtagacacatagctaaatgatatcattttattttagtatataatcaagacaaaaataaagtcattttgagaattcaaaaataaaataattagcacatcatataaattattatcacctttttatttttatctggtttaaatatcaaaataaaaaacctctgtatccaatgtgataaatcaaagtgagcttaacactttatttgctgatttataatatagtgttcgaaaaatctcaaaaattaatataaaaaaatttaaatttaaaagattaaaatcataaaaaaatataaataaataataaaaatattaaatactcaatttattaagtatataaataattatactaatattaaaatttaaatgataatttaaaatataatataatttttattttattgaactaattttaaaatttattattgacattattcgcaataaagtctaaaatcataaaagtcatacatctgaacaattattcaccaacaaaatgcggcgaattgaagcctgctgctggcatgtgtagtaataaccaaacaaaaacgcatgaacgagcagtgagacgtggaagcataaaagcaataaatgaagcaaagttagccacccaaccctctttccccttccacgtaccacacatgcaatatcccatttatcctataaataccaccatgcaccttcaacacccaactcacattcgaaaaaacacacacacacatctcaatcatcatattcttcaataatggtcaagctcagcatcctagtagctctcctgggcgcccttcttgtcgtagcctccgcgacaagatgggatcccgatcgagggtccagagggtcgagatgggacgcaccgagcagaggggatgaccagtgccagaggcagttgcagagggcaaacctgaggccctgtgaggaacatataaggcaaagggtggagcaagagcaagagcaagagcaagacgagtacccgtacatccaacggggatccagaggacaacgacccggcgaatctgacgaagaccaagagcaaaggtgctgcaacgagctcaaccggttccagaataaccaaaggtgcatgtgccaggcacttcaacagatcctccagaaccagagctttaggttccagcaggacaggagccagttgcatcagatggagagggagctcaggaacttgccccagaactgcgggttcaggtcaccaagccgttgcgacctcagtagccgcacgccctactaaacagactagtatagtgcgttttgcttacccaacaagagaaataacaatgataataataaatagcttttttacaagctatttctatgtctatggtgttttggtagcaataaagatcatcaccattttatgtagtggtgatcgtattgtctgtggcgaagttatatggggcactttgaaatgtgcttttatggcattgcctgtgcttttgataatgtaaaagagttgtaaacatgtcgatggaataataatcttgtttctttggcaatta

SEQ ID NO: 1515 - protein, 164 aa, Arachis hypogaea
MVKLSILVALLGALLVVASATRWDPDRGSRGSRWDAPSRGDDQCQRQLQRANLRPCEEHIRQRVEQEQEQEQDEYPYIQRGSRGQRPGESDEDQEQRCCNELNRFQNNQRCMCQALQQILQNQSFRFQQDRSQLHQMERELRNLPQNCGFRSPSRCDLSSRTPY

SEQ ID NO: 1516 - DNA, 20 bp, Arachis hypogaea
  source 1..20: mol_type = other DNA
attaattttaaaaaaacgag

SEQ ID NO: 1517 - DNA, 20 bp, Arachis hypogaea
  source 1..20: mol_type = other DNA
ctcgtttttttaaaattaat

SEQ ID NO: 1518 - DNA, 20 bp, Arachis hypogaea
  source 1..20: mol_type = other DNA
actaaatgaattaagaagga

SEQ ID NO: 1519 - DNA, 20 bp, Arachis hypogaea
  source 1..20: mol_type = other DNA
taatactaaatgaattaaga

SEQ ID NO: 1520 - DNA, 20 bp, Arachis hypogaea
  source 1..20: mol_type = other DNA
gattcagaaatattattacg

SEQ ID NO: 1521 - DNA, 20 bp, Arachis hypogaea
  source 1..20: mol_type = other DNA
actagctaccactcatagaa

SEQ ID NO: 1522 - DNA, 20 bp, Arachis hypogaea
  source 1..20: mol_type = other DNA
ttctgaatccattctatgag

SEQ ID NO: 1523 - DNA, 20 bp, Arachis hypogaea
  source 1..20: mol_type = other DNA
ttctagtaaggtatgtttta

SEQ ID NO: 1524 - DNA, 20 bp, Arachis hypogaea
  source 1..20: mol_type = other DNA
taaaaaataaaattctagta

SEQ ID NO: 1525 - DNA, 20 bp, Arachis hypogaea
  source 1..20: mol_type = other DNA
taaaataattctttacaagt

SEQ ID NO: 1526 - DNA, 20 bp, Arachis hypogaea
  source 1..20: mol_type = other DNA
gtcaaatgttagttaaaatt

SEQ ID NO: 1527 - DNA, 20 bp, Arachis hypogaea
  source 1..20: mol_type = other DNA
atttgacatttaatttgatt

SEQ ID NO: 1528 - DNA, 20 bp, Arachis hypogaea
  source 1..20: mol_type = other DNA
ttagtatatatgtatagtaa

SEQ ID NO: 1529 - DNA, 20 bp, Arachis hypogaea
  source 1..20: mol_type = other DNA
aaggctttaattcctaaaga

SEQ ID NO: 1530 - DNA, 20 bp, Arachis hypogaea
  source 1..20: mol_type = other DNA
aggctttaattcctaaagat

SEQ ID NO: 1531 - DNA, 20 bp, Arachis hypogaea
  source 1..20: mol_type = other DNA
ggaggccaaaacccatcttt

SEQ ID NO: 1532 - DNA, 20 bp, Arachis hypogaea
  source 1..20: mol_type = other DNA
taattcctaaagatgggttt

SEQ ID NO: 1533 - DNA, 20 bp, Arachis hypogaea
  source 1..20: mol_type = other DNA
cacaaaagagactgatgagg

SEQ ID NO: 1534 - DNA, 20 bp, Arachis hypogaea
  source 1..20: mol_type = other DNA
cttcacaaaagagactgatg

SEQ ID NO: 1535 - DNA, 20 bp, Arachis hypogaea
  source 1..20: mol_type = other DNA
gtctcttttgtgaagagaaa

SEQ ID NO: 1536 - DNA, 20 bp, Arachis hypogaea
  source 1..20: mol_type = other DNA
gagacagatcttgaggtgat

SEQ ID NO: 1537 - DNA, 20 bp, Arachis hypogaea
  source 1..20: mol_type = other DNA
aacgatagagacagatcttg

SEQ ID NO: 1538 - DNA, 20 bp, Arachis hypogaea
  source 1..20: mol_type = other DNA
attttgatgaattaaacaat

SEQ ID NO: 1539 - DNA, 20 bp, Arachis hypogaea
  source 1..20: mol_type = other DNA
tcaaaagattagacgcattt

SEQ ID NO: 1540 - DNA, 20 bp, Arachis hypogaea
  source 1..20: mol_type = other DNA
ttaatcaatccagattgatt

SEQ ID NO: 1541 - DNA, 20 bp, Arachis hypogaea
  source 1..20: mol_type = other DNA
taactgaatccaaatcaatc

SEQ ID NO: 1542 - DNA, 20 bp, Arachis hypogaea
  source 1..20: mol_type = other DNA
tggattgattaaactcgaat

SEQ ID NO: 1543 - DNA, 20 bp, Arachis hypogaea
  source 1..20: mol_type = other DNA
attggattagttcagatgat

SEQ ID NO: 1544 - DNA, 20 bp, Arachis hypogaea
  source 1..20: mol_type = other DNA
ttggattagttcagatgatt

SEQ ID NO: 1545 - DNA, 20 bp, Arachis hypogaea
  source 1..20: mol_type = other DNA
tttttaattttatttttaat

SEQ ID NO: 1546 - DNA, 20 bp, Arachis hypogaea
  source 1..20: mol_type = other DNA
tttaaataactattattatt

SEQ ID NO: 1547 - DNA, 20 bp, Arachis hypogaea
  source 1..20: mol_type = other DNA
ttaattaatattaaattaat

SEQ ID NO: 1548 - DNA, 20 bp, Arachis hypogaea
  source 1..20: mol_type = other DNA
taattaatattaaattaatt

SEQ ID NO: 1549 - DNA, 20 bp, Arachis hypogaea
  source 1..20: mol_type = other DNA
ttggcttaattattcattct

SEQ ID NO: 1550 - DNA, 20 bp, Arachis hypogaea
  source 1..20: mol_type = other DNA
attggcttaattattcattc

SEQ ID NO: 1551 - DNA, 20 bp, Arachis hypogaea
  source 1..20: mol_type = other DNA
caattaaactcaatcttaat

SEQ ID NO: 1552 - DNA, 20 bp, Arachis hypogaea
  source 1..20: mol_type = other DNA
ttgaatttaaataaataatt

SEQ ID NO: 1553 - DNA, 20 bp, Arachis hypogaea
  source 1..20: mol_type = other DNA
gagtcttttgtattatggta

SEQ ID NO: 1554 - DNA, 20 bp, Arachis hypogaea
  source 1..20: mol_type = other DNA
tgtaggagtcttttgtatta

SEQ ID NO: 1555 - DNA, 20 bp, Arachis hypogaea
  source 1..20: mol_type = other DNA
tatcaattaacataagatgt

SEQ ID NO: 1556 - DNA, 20 bp, Arachis hypogaea
  source 1..20: mol_type = other DNA
tctaaaatttatataatgat

SEQ ID NO: 1557 - DNA, 20 bp, Arachis hypogaea
  source 1..20: mol_type = other DNA
aaacataatttattatattg

SEQ ID NO: 1558 - DNA, 20 bp, Arachis hypogaea
  source 1..20: mol_type = other DNA
tgtggcagacacatgtttac

SEQ ID NO: 1559 - DNA, 20 bp, Arachis hypogaea
  source 1..20: mol_type = other DNA
atatatatattttttcaatt

SEQ ID NO: 1560 - DNA, 20 bp, Arachis hypogaea
  source 1..20: mol_type = other DNA
aaattaagaattattattgt

SEQ ID NO: 1561 - DNA, 20 bp, Arachis hypogaea
  source 1..20: mol_type = other DNA
acattatacatttttattaa

SEQ ID NO: 1562 - DNA, 20 bp, Arachis hypogaea
  source 1..20: mol_type = other DNA
aaaatgtataatgtgacaaa

SEQ ID NO: 1563 - DNA, 20 bp, Arachis hypogaea
  source 1..20: mol_type = other DNA
aaatgtataatgtgacaaac

SEQ ID NO: 1564 - DNA, 20 bp, Arachis hypogaea
  source 1..20: mol_type = other DNA
attagtacaatgaaatatta

SEQ ID NO: 1565 - DNA, 20 bp, Arachis hypogaea
  source 1..20: mol_type = other DNA
atttttgaatttttttgatg

SEQ ID NO: 1566 - DNA, 20 bp, Arachis hypogaea
  source 1..20: mol_type = other DNA
taaaccagataaaaataaaa

SEQ ID NO: 1567 - DNA, 20 bp, Arachis hypogaea
  source 1..20: mol_type = other DNA
atcacctttttatttttatc

SEQ ID NO: 1568 - DNA, 20 bp, Arachis hypogaea
  source 1..20: mol_type = other DNA
atttatcacattggatacag

SEQ ID NO: 1569 - DNA, 20 bp, Arachis hypogaea
  source 1..20: mol_type = other DNA
ctcactttgatttatcacat

SEQ ID NO: 1570 - DNA, 20 bp, Arachis hypogaea
  source 1..20: mol_type = other DNA
ttcaattcgccgcattttgt

SEQ ID NO: 1571 - DNA, 20 bp, Arachis hypogaea
  source 1..20: mol_type = other DNA
aattattcaccaacaaaatg

SEQ ID NO: 1572 - DNA, 20 bp, Arachis hypogaea
  source 1..20: mol_type = other DNA
ggcgaattgaagcctgctgc

SEQ ID NO: 1573 - DNA, 20 bp, Arachis hypogaea
  source 1..20: mol_type = other DNA
ttactacacatgccagcagc

SEQ ID NO: 1574 - DNA, 20 bp, Arachis hypogaea
  source 1..20: mol_type = other DNA
ctcgttcatgcgtttttgtt

SEQ ID NO: 1575 - DNA, 20 bp, Arachis hypogaea
  source 1..20: mol_type = other DNA
catgaacgagcagtgagacg

SEQ ID NO: 1576 - DNA, 20 bp, Arachis hypogaea
  source 1..20: mol_type = other DNA
gaaggggaaagagggttggg

SEQ ID NO: 1577 - DNA, 20 bp, Arachis hypogaea
  source 1..20: mol_type = other DNA
gtggaaggggaaagagggtt

SEQ ID NO: 1578 - DNA, 20 bp, Arachis hypogaea
  source 1..20: mol_type = other DNA
cgtggaaggggaaagagggt

SEQ ID NO: 1579 - DNA, 20 bp, Arachis hypogaea
  source 1..20: mol_type = other DNA
ggtacgtggaaggggaaaga

SEQ ID NO: 1580 - DNA, 20 bp, Arachis hypogaea
  source 1..20: mol_type = other DNA
tggtacgtggaaggggaaag

SEQ ID NO: 1581 - DNA, 20 bp, Arachis hypogaea
  source 1..20: mol_type = other DNA
gcatgtgtggtacgtggaag

SEQ ID NO: 1582 - DNA, 20 bp, Arachis hypogaea
  source 1..20: mol_type = other DNA
tgcatgtgtggtacgtggaa

SEQ ID NO: 1583 - DNA, 20 bp, Arachis hypogaea
  source 1..20: mol_type = other DNA
ttgcatgtgtggtacgtgga

SEQ ID NO: 1584 - DNA, 20 bp, Arachis hypogaea
  source 1..20: mol_type = other DNA
gatattgcatgtgtggtacg

SEQ ID NO: 1585 - DNA, 20 bp, Arachis hypogaea
  source 1..20: mol_type = other DNA
taaatgggatattgcatgtg

SEQ ID NO: 1586 - DNA, 20 bp, Arachis hypogaea
  source 1..20: mol_type = other DNA
gtggtatttataggataaat

SEQ ID NO: 1587 - DNA, 20 bp, Arachis hypogaea
  source 1..20: mol_type = other DNA
ggtggtatttataggataaa

SEQ ID NO: 1588 - DNA, 20 bp, Arachis hypogaea
  source 1..20: mol_type = other DNA
aggtgcatggtggtatttat

SEQ ID NO: 1589 - DNA, 20 bp, Arachis hypogaea
  source 1..20: mol_type = other DNA
tgggtgttgaaggtgcatgg

SEQ ID NO: 1590 - DNA, 20 bp, Arachis hypogaea
  source 1..20: mol_type = other DNA
agttgggtgttgaaggtgca

SEQ ID NO: 1591 - DNA, 20 bp, Arachis hypogaea
  source 1..20: mol_type = other DNA
gaatgtgagttgggtgttga

SEQ ID NO: 1592 - DNA, 20 bp, Arachis hypogaea
  source 1..20: mol_type = other DNA
tgttttttcgaatgtgagtt

SEQ ID NO: 1593 - DNA, 20 bp, Arachis hypogaea
  source 1..20: mol_type = other DNA
gtgttttttcgaatgtgagt

SEQ ID NO: 1594 - DNA, 20 bp, Arachis hypogaea
  source 1..20: mol_type = other DNA
atcatcatattcttcaataa

SEQ ID NO: 1595 - DNA, 20 bp, Arachis hypogaea
  source 1..20: mol_type = other DNA
gggcgcccaggagagctact

SEQ ID NO: 1596 - DNA, 20 bp, Arachis hypogaea
  source 1..20: mol_type = other DNA
cagcatcctagtagctctcc

SEQ ID NO: 1597 - DNA, 20 bp, Arachis hypogaea
  source 1..20: mol_type = other DNA
agcatcctagtagctctcct

SEQ ID NO: 1598 - DNA, 20 bp, Arachis hypogaea
  source 1..20: mol_type = other DNA
ctacgacaagaagggcgccc

SEQ ID NO: 1599 - DNA, 20 bp, Arachis hypogaea
  source 1..20: mol_type = other DNA
cgcggaggctacgacaagaa

SEQ ID NO: 1600 - DNA, 20 bp, Arachis hypogaea
  source 1..20: mol_type = other DNA
tcgcggaggctacgacaaga

SEQ ID NO: 1601 - DNA, 20 bp, Arachis hypogaea
  source 1..20: mol_type = other DNA
gggatcccatcttgtcgcgg

SEQ ID NO: 1602 - DNA, 20 bp, Arachis hypogaea
  source 1..20: mol_type = other DNA
atcgggatcccatcttgtcg

SEQ ID NO: 1603 - DNA, 20 bp, Arachis hypogaea
  source 1..20: mol_type = other DNA
tcgtagcctccgcgacaaga

SEQ ID NO: 1604 - DNA, 20 bp, Arachis hypogaea
  source 1..20: mol_type = other DNA
cgtagcctccgcgacaagat

SEQ ID NO: 1605 - DNA, 20 bp, Arachis hypogaea
  source 1..20: mol_type = other DNA
acaagatgggatcccgatcg

SEQ ID NO: 1606 - DNA, 20 bp, Arachis hypogaea
  source 1..20: mol_type = other DNA
caagatgggatcccgatcga

SEQ ID NO: 1607 - DNA, 20 bp, Arachis hypogaea
  source 1..20: mol_type = other DNA
gaccctctggaccctcgatc

SEQ ID NO: 1608 - DNA, 20 bp, Arachis hypogaea
  source 1..20: mol_type = other DNA
cgaccctctggaccctcgat

SEQ ID NO: 1609 - DNA, 20 bp, Arachis hypogaea
  source 1..20: mol_type = other DNA
gatcccgatcgagggtccag

SEQ ID NO: 1610 - DNA, 20 bp, Arachis hypogaea
  source 1..20: mol_type = other DNA
atcccgatcgagggtccaga

SEQ ID NO: 1611 - DNA, 20 bp, Arachis hypogaea
  source 1..20: mol_type = other DNA
tgcgtcccatctcgaccctc

SEQ ID NO: 1612 - DNA, 20 bp, Arachis hypogaea
  source 1..20: mol_type = other DNA
gagggtccagagggtcgaga

SEQ ID NO: 1613 - DNA, 20 bp, Arachis hypogaea
  source 1..20: mol_type = other DNA
agggtccagagggtcgagat

SEQ ID NO: 1614 - DNA, 20 bp, Arachis hypogaea
  source 1..20: mol_type = other DNA
agatgggacgcaccgagcag

SEQ ID NO: 1615 - DNA, 20 bp, Arachis hypogaea
  source 1..20: mol_type = other DNA
gatgggacgcaccgagcaga

SEQ ID NO: 1616 - DNA, 20 bp, Arachis hypogaea
  source 1..20: mol_type = other DNA
cactggtcatcccctctgct

SEQ ID NO: 1617 - DNA, 20 bp, Arachis hypogaea
  source 1..20: mol_type = other DNA
atgggacgcaccgagcagag

SEQ ID NO: 1618 - DNA, 20 bp, Arachis hypogaea
  source 1..20: mol_type = other DNA
tctgcaactgcctctggcac

SEQ ID NO: 1619 - DNA, 20 bp, Arachis hypogaea
  source 1..20: mol_type = other DNA
gaggggatgaccagtgccag

SEQ ID NO: 1620 - DNA, 20 bp, Arachis hypogaea
  source 1..20: mol_type = other DNA
ttgccctctgcaactgcctc

SEQ ID NO: 1621 - DNA, 20 bp, Arachis hypogaea
  source 1..20: mol_type = other DNA
agtgccagaggcagttgcag

SEQ ID NO: 1622 - DNA, 20 bp, Arachis hypogaea
  source 1..20: mol_type = other DNA
gtgccagaggcagttgcaga

SEQ ID NO: 1623 - DNA, 20 bp, Arachis hypogaea
  source 1..20: mol_type = other DNA
agttgcagagggcaaacctg

SEQ ID NO: 1624 - DNA, 20 bp, Arachis hypogaea
  source 1..20: mol_type = other DNA
tatgttcctcacagggcctc

SEQ ID NO: 1625 - DNA, 20 bp, Arachis hypogaea
  source 1..20: mol_type = other DNA
ggcaaacctgaggccctgtg

SEQ ID NO: 1626 - DNA, 20 bp, Arachis hypogaea
  source 1..20: mol_type = other DNA
tgccttatatgttcctcaca

SEQ ID NO: 1627 - DNA, 20 bp, Arachis hypogaea
  source 1..20: mol_type = other DNA
ttgccttatatgttcctcac

SEQ ID NO: 1628 - DNA, 20 bp, Arachis hypogaea
  source 1..20: mol_type = other DNA
ggccctgtgaggaacatata

SEQ ID NO: 1629 - DNA, 20 bp, Arachis hypogaea
  source 1..20: mol_type = other DNA
gtgaggaacatataaggcaa

SEQ ID NO: 1630 - DNA, 20 bp, Arachis hypogaea
  source 1..20: mol_type = other DNA
tgaggaacatataaggcaaa

SEQ ID NO: 1631 - DNA, 20 bp, Arachis hypogaea
  source 1..20: mol_type = other DNA
ggaacatataaggcaaaggg

SEQ ID NO: 1632 - DNA, 20 bp, Arachis hypogaea
  source 1..20: mol_type = other DNA
tggatccccgttggatgtac

SEQ ID NO: 1633 - DNA, 20 bp, Arachis hypogaea
  source 1..20: mol_type = other DNA
ctggatccccgttggatgta

SEQ ID NO: 1634 - DNA, 20 bp, Arachis hypogaea
  source 1..20: mol_type = other DNA
acgagtacccgtacatccaa

SEQ ID NO: 1635 - DNA, 20 bp, Arachis hypogaea
  source 1..20: mol_type = other DNA
cgagtacccgtacatccaac

SEQ ID NO: 1636 - DNA, 20 bp, Arachis hypogaea
  source 1..20: mol_type = other DNA
gagtacccgtacatccaacg

SEQ ID NO: 1637 - DNA, 20 bp, Arachis hypogaea
  source 1..20: mol_type = other DNA
gttgtcctctggatccccgt

SEQ ID NO: 1638 - DNA, 20 bp, Arachis hypogaea
  source 1..20: mol_type = other DNA
tacatccaacggggatccag

SEQ ID NO: 1639 - DNA, 20 bp, Arachis hypogaea
  source 1..20: mol_type = other DNA
ttcgccgggtcgttgtcctc

SEQ ID NO: 1640 - DNA, 20 bp, Arachis hypogaea
  source 1..20: mol_type = other DNA
ggatccagaggacaacgacc

SEQ ID NO: 1641 - DNA, 20 bp, Arachis hypogaea
  source 1..20: mol_type = other DNA
tggtcttcgtcagattcgcc

SEQ ID NO: 1642 - DNA, 20 bp, Arachis hypogaea
  source 1..20: mol_type = other DNA
ttggtcttcgtcagattcgc

SEQ ID NO: 1643 - DNA, 20 bp, Arachis hypogaea
  source 1..20: mol_type = other DNA
cgttgcagcacctttgctct

SEQ ID NO: 1644 - DNA, 20 bp, Arachis hypogaea
  source 1..20: mol_type = other DNA
ctgacgaagaccaagagcaa

SEQ ID NO: 1645 - DNA, 20 bp, Arachis hypogaea
  source 1..20: mol_type = other DNA
ggtgctgcaacgagctcaac

SEQ ID NO: 1646 - DNA, 20 bp, Arachis hypogaea
  source 1..20: mol_type = other DNA
acctttggttattctggaac

SEQ ID NO: 1647 - DNA, 20 bp, Arachis hypogaea
  source 1..20: mol_type = other DNA
acatgcacctttggttattc

SEQ ID NO: 1648 - DNA, 20 bp, Arachis hypogaea
  source 1..20: mol_type = other DNA
accggttccagaataaccaa

SEQ ID NO: 1649 - DNA, 20 bp, Arachis hypogaea
  source 1..20: mol_type = other DNA
gtgcctggcacatgcacctt

SEQ ID NO: 1650 - DNA, 20 bp, Arachis hypogaea
  source 1..20: mol_type = other DNA
taaccaaaggtgcatgtgcc

SEQ ID NO: 1651 - DNA, 20 bp, Arachis hypogaea
  source 1..20: mol_type = other DNA
ggaggatctgttgaagtgcc

SEQ ID NO: 1652 - DNA, 20 bp, Arachis hypogaea
  source 1..20: mol_type = other DNA
acctaaagctctggttctgg

SEQ ID NO: 1653 - DNA, 20 bp, Arachis hypogaea
  source 1..20: mol_type = other DNA
ggaacctaaagctctggttc

SEQ ID NO: 1654 - DNA, 20 bp, Arachis hypogaea
  source 1..20: mol_type = other DNA
cctgctggaacctaaagctc

SEQ ID NO: 1655 - DNA, 20 bp, Arachis hypogaea
  source 1..20: mol_type = other DNA
tcctccagaaccagagcttt

SEQ ID NO: 1656 - DNA, 20 bp, Arachis hypogaea
  source 1..20: mol_type = other DNA
ccagagctttaggttccagc

SEQ ID NO: 1657 - DNA, 20 bp, Arachis hypogaea
  source 1..20: mol_type = other DNA
gcaactggctcctgtcctgc

SEQ ID NO: 1658 - DNA, 20 bp, Arachis hypogaea
  source 1..20: mol_type = other DNA
gctttaggttccagcaggac

SEQ ID NO: 1659 - DNA, 20 bp, Arachis hypogaea
  source 1..20: mol_type = other DNA
ccctctccatctgatgcaac

SEQ ID NO: 1660 - DNA, 20 bp, Arachis hypogaea
  source 1..20: mol_type = other DNA
caggagccagttgcatcaga

SEQ ID NO: 1661 - DNA, 20 bp, Arachis hypogaea
  source 1..20: mol_type = other DNA
gccagttgcatcagatggag

SEQ ID NO: 1662 - DNA, 20 bp, Arachis hypogaea
  source 1..20: mol_type = other DNA
ccagttgcatcagatggaga

SEQ ID NO: 1663 - DNA, 20 bp, Arachis hypogaea
  source 1..20: mol_type = other DNA
atcagatggagagggagctc

SEQ ID NO: 1664 - DNA, 20 bp, Arachis hypogaea
  source 1..20: mol_type = other DNA
gacctgaacccgcagttctg

SEQ ID NO: 1665 - DNA, 20 bp, Arachis hypogaea
  source 1..20: mol_type = other DNA
tgacctgaacccgcagttct

SEQ ID NO: 1666 - DNA, 20 bp, Arachis hypogaea
  source 1..20: mol_type = other DNA
aggaacttgccccagaactg

SEQ ID NO: 1667 - DNA, 20 bp, Arachis hypogaea
  source 1..20: mol_type = other DNA
gtgacctgaacccgcagttc

SEQ ID NO: 1668 - DNA, 20 bp, Arachis hypogaea
  source 1..20: mol_type = other DNA
ggaacttgccccagaactgc

SEQ ID NO: 1669 - DNA, 20 bp, Arachis hypogaea
  source 1..20: mol_type = other DNA
tgccccagaactgcgggttc

SEQ ID NO: 1670 - DNA, 20 bp, Arachis hypogaea
  source 1..20: mol_type = other DNA
ctactgaggtcgcaacggct

SEQ ID NO: 1671 - DNA, 20 bp, Arachis hypogaea
  source 1..20: mol_type = other DNA
tgcggctactgaggtcgcaa

SEQ ID NO: 1672 - DNA, 20 bp, Arachis hypogaea
  source 1..20: mol_type = other DNA
agtagggcgtgcggctactg

SEQ ID NO: 1673 - DNA, 20 bp, Arachis hypogaea
  source 1..20: mol_type = other DNA
agtctgtttagtagggcgtg

SEQ ID NO: 1674 - DNA, 20 bp, Arachis hypogaea
  source 1..20: mol_type = other DNA
ctatactagtctgtttagta

SEQ ID NO: 1675 - DNA, 20 bp, Arachis hypogaea
  source 1..20: mol_type = other DNA
actatactagtctgtttagt

SEQ ID NO: 1676 - DNA, 20 bp, Arachis hypogaea
  source 1..20: mol_type = other DNA
tcattgttatttctcttgtt

SEQ ID NO: 1677 - DNA, 20 bp, Arachis hypogaea
  source 1..20: mol_type = other DNA
atcattgttatttctcttgt

SEQ ID NO: 1678 - DNA, 20 bp, Arachis hypogaea
  source 1..20: mol_type = other DNA
acaagctatttctatgtcta

SEQ ID NO: 1679 - DNA, 20 bp, Arachis hypogaea
  source 1..20: mol_type = other DNA
tttctatgtctatggtgttt

SEQ ID NO: 1680 - DNA, 20 bp, Arachis hypogaea
  source 1..20: mol_type = other DNA
acgatcaccactacataaaa

SEQ ID NO: 1681 - DNA, 20 bp, Arachis hypogaea
  source 1..20: mol_type = other DNA
atcatcaccattttatgtag

SEQ ID NO: 1682 - DNA, 20 bp, Arachis hypogaea
  source 1..20: mol_type = other DNA
agtggtgatcgtattgtctg

SEQ ID NO: 1683 - DNA, 20 bp, Arachis hypogaea
  source 1..20: mol_type = other DNA
ttgtctgtggcgaagttata

SEQ ID NO: 1684 - DNA, 20 bp, Arachis hypogaea
  source 1..20: mol_type = other DNA
tgtctgtggcgaagttatat

SEQ ID NO: 1685 - DNA, 20 bp, Arachis hypogaea
  source 1..20: mol_type = other DNA
gtctgtggcgaagttatatg

SEQ ID NO: 1686 - DNA, 20 bp, Arachis hypogaea
  source 1..20: mol_type = other DNA
cactttgaaatgtgctttta

SEQ ID NO: 1687 - DNA, 20 bp, Arachis hypogaea
  source 1..20: mol_type = other DNA
ttttacattatcaaaagcac

SEQ ID NO: 1688 - DNA, 20 bp, Arachis hypogaea
  source 1..20: mol_type = other DNA
aagagttgtaaacatgtcga

SEQ ID NO: 1689 - DNA, 20 bp, Arachis hypogaea
  source 1..20: mol_type = other DNA
gaataataatcttgtttctt

SEQ ID NO: 1690 - DNA, 4458 bp, Arachis hypogaea
  source 1..4458: mol_type = genomic DNA
ccaacagggtgacctagcgcaccctcatgcgtcatggcgtccaggtccagagaagaaaaatatggtggatactgctgtgtgccagagctagaaccaccgccagccaatgcaggcccagccgcttgaacctcgtccccgctatcatcctcaatcgtttcgggctcaacgtcgtcctcatcaggatcacccaattctccgtctccgacgccaaccggtggaacgccctgtaaagcgtttgccagaacatcaaaggatcctacctcgtcgcggacgccgtcattcaaatcaacagcaaatgacggagaggcgacaagttgggccgctggctcgtaaactggtacggaggaagaggccacagcagccatcgaactggagccagctgccgtggctacattggtggtattccggttcgaaccccctgagctggataccacatcaaccagctttgccagcaactctggtgtgcggacctccggaaactgcctccgacaaagaaacatgacttggaggtcctcatcactaccaatcgtcagacaatcatacttcaccgtatcgtgcaggatcgtgactggaatgcgatagaaaaacttcttaatccgcttcgcaccttccaggccaagtttcatcagcacagctctaaccaggtcatcatagcttgtcgttcgattcaccacaatatagagaggattcttatctgtgaacttcactccggaccgagttttcctcttgatggatcctttgtggtgtaccaaaacagcaaaactctcctcctcactagccatgttacgtcctctaatgagagcaattcacgtttacagcgtttatatagagctctgattcctactaattcgaactaacctggttcgaaccatcatacatgtaattcgaaccaagccggttcgaattactacaaccaacctctctttggttcgaaccagtttggttcgaaccaagaaagcatgtaattcgaaccagcctggttcgaattactacaaccaagctctctccccataattcgaaccaaccaggttcgaattacatgctttcttggttcgaaccaatctggttcgaattattcagactttttcagtagtagttcgaaccatgttggttcgaattactagttaatacagttcgaaccatgctggttcgatttatataaaaatgcctcttggcttattgctaaaacaaatttctgtttggcgtattttggttaaacttttctgcatgtggcttaatatggttttttgccctaaaaaatatataaaaaatatttaaacgatatatatatattgatttaatataatatttttcttttaaataccttaagacttaagtgtatgttttttttctttcttatattaaagtcaagtttataattttttttctctttttccttcctagtgataggcacgctttatactttaaagaaaaaacaaaagagtgtagtatacgatgcatagaaagaaaacgatatacaaaatatgaaaaattgggagttctagaagggcgtctagaaattttcatccactttaaatgccactacatgtctacattcattttgtttctggttgtgtgttcaatatacttcagtagtaatttatttatgttgaattctatgttgtctttaaaattgtgtctaatttattaaaaaagtcaaatagataatatttaataaattttaaatattttactttttattttaaatattttattttttatttttaaaagcaagttagataatttagacatggtagtaaaaaacactgtagaactcacctttatttattgcatcaaatatgggtaaacattgaatacgactgaggagaacgccttatttgaaacttgaaagtgatgtgttcaatttaatgttaactttgttgaatttgattgcttccaattgcaatatttgacaatttaaagcttgaattagtctccactaataatattcttccacccgaatatcttaacttcgaaaatgggataaaataatgcttgatattaaattacttctaatgataatgtatagtgtctaaaaaaatattataaaaattaatttttttagtcaactatcaatcaacatttttttattaataacaattcgaatcttaatccttatttatattttcttttattgctgagtaattgttagttaagaaaaattagtttttaatatatctatctgcttagctattttatatatataaaattcacaattggtataaggtgacactgaccgatgagtagaatagtatttagaataaaattaaagatatgtttggttaatatttttattttttatttttaaattattttaggtaaaaataataactattttctgtttctaaatttttttttaaagattttaaaaacaaaaatattaaaaataaaaataaaaattaacaaactctaaaaaaataaaaaataacattaaaaatacccaacatggcagacacaataaattaacaacaaaaatactatttatatattaaagaaaaagtctagagaaccaatattttcattaagaggagtgttaagggtcagtcatttttatggtttgtaaccatcaattgactatcaatagtatttttaattatgtgagattacatctaatggtgggatattactcacttttttttatggttaagtgttggctacaaaatacaaaagttgctgcccctaaactttctcattaaaatttggctagcacttaaccaacaaaagaaaaatgagtaatctcacatcattaaaaacatcaataatagctaattgatggttacaaattataaaatttgctggctcctaatactcttcttattaaaatcggttgctatgtatttatatatatattatttaatttatatttaatatatattttatattttaatttatatgaagcatgaattattaacaataagtcagcagtgagcacgttcataattcgcatacacaccattccatctgcaattcccttgaccccattatatgcctataaatagaagccactcctctgctcatcaaccacacactacaaatctaacctcacttattactatctacttctcattcctttcattccttcccttagcttcttaactcagtcatgggcgtcttcacttttgaggatgaaatcacctccaccctgccccctgctaagctttacaacgctctgaaggatgccgataccatcacccctaagattattgatgacgtcaagagtgttgaaatcgttgagggaaacggtggtcctggaaccatcaagaaactcaccattgtcgagggtcagtaactattaattcagtcaaaatgatcacttttcttttgttttaagtactagtaacattttaataaaagtactcgttttatagacttttttaaatttttatttttttaaaataatttataaaaattaagatctccatgtaaacgatctcggtctatctgtagacatatacataacagagcacaatggcgtcgtttgattcatgtagccgaccctatttagtgggacaagactttgttgttgtttgtaatttataaaaattaacttttaaaaattgtatatttctatatttaaaaattaaattaaaaataatttttaataaatataaacaacaagtatattaataaaataatttttaaaatttaaaaatattataacagatattaatataaaaattaaatttaaataaaattatattatactttttaattttgataaatataaattaaatttaaaatttttttttagatattttcaaaaatatttttaacttttaaaagctaaacacaagtatgtacatgaaataaatatgggttgtgaattgtaataataataatgatgatatatatgcagatggagaaaccaagtttatcttgcacaaggtggagtcaatagatgaggccaactatgcatacaactacagcgttgttggaggagtggctctgcctcccacggcggagaagataacatttgagacaaagctggttgaaggacccaacggaggatccattgggaagcttactctcaagtaccacaccaaaggagatgcaaagccagatgaggaagagttgaagaagggtaaggccaagggtgaaggtctcttcagggctattgagggttacgccttggccaacccttctcaatattagaacacatactttgctcaatcttcatacacaagtttctttttagtattatttctatacagtttttttcgtgtgaaaataatagttaaataatttcacatgtttgactaaacaatatgtcattttcacacggagaagactagttgggaattttcattttctgttgggcatgtttgtgtggtgtgcgcttgtgcttcaagtaattggttttctactctgtaataagtgttgccttctatctgctgcagctttgtctttgtgtgagcttcatatcaataaaatttaatacaaaagaaatttgaataatta

SEQ ID NO: 1691 - protein, 157 aa, Arachis hypogaea
MGVFTFEDEITSTLPPAKLYNALKDADTITPKIIDDVKSVEIVEGNGGPGTIKKLTIVEDGETKFILHKVESIDEANYAYNYSVVGGVALPPTAEKITFETKLVEGPNGGSIGKLTLKYHTKGDAKPDEEELKKGKAKGEGLFRAIEGYALANPSQY

SEQ ID NO: 1692 - DNA, 20 bp, Arachis hypogaea
  source 1..20: mol_type = other DNA
ggtgcgctaggtcaccctgt

SEQ ID NO: 1693 - DNA, 20 bp, Arachis hypogaea
  source 1..20: mol_type = other DNA
atgacgcatgagggtgcgct

SEQ ID NO: 1694 - DNA, 20 bp, Arachis hypogaea
  source 1..20: mol_type = other DNA
ctggacgccatgacgcatga

SEQ ID NO: 1695 - DNA, 20 bp, Arachis hypogaea
  source 1..20: mol_type = other DNA
cctggacgccatgacgcatg

SEQ ID NO: 1696 - DNA, 20 bp, Arachis hypogaea
  source 1..20: mol_type = other DNA
tagcgcaccctcatgcgtca

SEQ ID NO: 1697 - DNA, 20 bp, Arachis hypogaea
  source 1..20: mol_type = other DNA
cctcatgcgtcatggcgtcc

SEQ ID NO: 1698 - DNA, 20 bp, Arachis hypogaea
  source 1..20: mol_type = other DNA
atatttttcttctctggacc

SEQ ID NO: 1699 - DNA, 20 bp, Arachis hypogaea
  source 1..20: mol_type = other DNA
tccaccatatttttcttctc

SEQ ID NO: 1700 - DNA, 20 bp, Arachis hypogaea
  source 1..20: mol_type = other DNA
aggtccagagaagaaaaata

SEQ ID NO: 1701 - DNA, 20 bp, Arachis hypogaea
  source 1..20: mol_type = other DNA
tccagagaagaaaaatatgg

SEQ ID NO: 1702 - DNA, 20 bp, Arachis hypogaea
  source 1..20: mol_type = other DNA
gctggcggtggttctagctc

SEQ ID NO: 1703 - DNA, 20 bp, Arachis hypogaea
  source 1..20: mol_type = other DNA
gggcctgcattggctggcgg

SEQ ID NO: 1704 - DNA, 20 bp, Arachis hypogaea
  source 1..20: mol_type = other DNA
gctgggcctgcattggctgg

SEQ ID NO: 1705 - DNA, 20 bp, Arachis hypogaea
  source 1..20: mol_type = other DNA
gcggctgggcctgcattggc

SEQ ID NO: 1706 - DNA, 20 bp, Arachis hypogaea
  source 1..20: mol_type = other DNA
gaaccaccgccagccaatgc

SEQ ID NO: 1707 - DNA, 20 bp, Arachis hypogaea
  source 1..20: mol_type = other DNA
tcaagcggctgggcctgcat

SEQ ID NO: 1708 - DNA, 20 bp, Arachis hypogaea
  source 1..20: mol_type = other DNA
gggacgaggttcaagcggct

SEQ ID NO: 1709 - DNA, 20 bp, Arachis hypogaea
  source 1..20: mol_type = other DNA
ggggacgaggttcaagcggc

SEQ ID NO: 1710 - DNA, 20 bp, Arachis hypogaea
  source 1..20: mol_type = other DNA
tagcggggacgaggttcaag

SEQ ID NO: 1711 - DNA, 20 bp, Arachis hypogaea
  source 1..20: mol_type = other DNA
tgaggatgatagcggggacg

SEQ ID NO: 1712 - DNA, 20 bp, Arachis hypogaea
  source 1..20: mol_type = other DNA
aacgattgaggatgatagcg

SEQ ID NO: 1713 - DNA, 20 bp, Arachis hypogaea
  source 1..20: mol_type = other DNA
aaacgattgaggatgatagc

SEQ ID NO: 1714 - DNA, 20 bp, Arachis hypogaea
  source 1..20: mol_type = other DNA
gaaacgattgaggatgatag

SEQ ID NO: 1715 - DNA, 20 bp, Arachis hypogaea
  source 1..20: mol_type = other DNA
cgttgagcccgaaacgattg

SEQ ID NO: 1716 - DNA, 20 bp, Arachis hypogaea
  source 1..20: mol_type = other DNA
gctatcatcctcaatcgttt

SEQ ID NO: 1717 - DNA, 20 bp, Arachis hypogaea
  source 1..20: mol_type = other DNA
ctatcatcctcaatcgtttc

SEQ ID NO: 1718 - DNA, 20 bp, Arachis hypogaea
  source 1..20: mol_type = other DNA
ggctcaacgtcgtcctcatc

SEQ ID NO: 1719 - DNA, 20 bp, Arachis hypogaea
  source 1..20: mol_type = other DNA
agaattgggtgatcctgatg

SEQ ID NO: 1720 - DNA, 20 bp, Arachis hypogaea
  source 1..20: mol_type = other DNA
ggcgtcggagacggagaatt

SEQ ID NO: 1721 - DNA, 20 bp, Arachis hypogaea
  source 1..20: mol_type = other DNA
tggcgtcggagacggagaat

SEQ ID NO: 1722 - DNA, 20 bp, Arachis hypogaea
  source 1..20: mol_type = other DNA
ccaccggttggcgtcggaga

SEQ ID NO: 1723 - DNA, 20 bp, Arachis hypogaea
  source 1..20: mol_type = other DNA
ggcgttccaccggttggcgt

SEQ ID NO: 1724 - DNA, 20 bp, Arachis hypogaea
  source 1..20: mol_type = other DNA
tctccgtctccgacgccaac

SEQ ID NO: 1725 - DNA, 20 bp, Arachis hypogaea
  source 1..20: mol_type = other DNA
ccgtctccgacgccaaccgg

SEQ ID NO: 1726 - DNA, 20 bp, Arachis hypogaea
  source 1..20: mol_type = other DNA
ttacagggcgttccaccggt

SEQ ID NO: 1727 - DNA, 20 bp, Arachis hypogaea
  source 1..20: mol_type = other DNA
cgctttacagggcgttccac

SEQ ID NO: 1728 - DNA, 20 bp, Arachis hypogaea
  source 1..20: mol_type = other DNA
gttctggcaaacgctttaca

SEQ ID NO: 1729 - DNA, 20 bp, Arachis hypogaea
  source 1..20: mol_type = other DNA
tgttctggcaaacgctttac

SEQ ID NO: 1730 - DNA, 20 bp, Arachis hypogaea
  source 1..20: mol_type = other DNA
ggtaggatcctttgatgttc

SEQ ID NO: 1731 - DNA, 20 bp, Arachis hypogaea
  source 1..20: mol_type = other DNA
agcgtttgccagaacatcaa

SEQ ID NO: 1732 - DNA, 20 bp, Arachis hypogaea
  source 1..20: mol_type = other DNA
gacggcgtccgcgacgaggt

SEQ ID NO: 1733 - DNA, 20 bp, Arachis hypogaea
  source 1..20: mol_type = other DNA
caaaggatcctacctcgtcg

SEQ ID NO: 1734 - DNA, 20 bp, Arachis hypogaea
  source 1..20: mol_type = other DNA
gaatgacggcgtccgcgacg

SEQ ID NO: 1735 - DNA, 20 bp, Arachis hypogaea
  source 1..20: mol_type = other DNA
tttgctgttgatttgaatga

SEQ ID NO: 1736 - DNA, 20 bp, Arachis hypogaea
  source 1..20: mol_type = other DNA
ttcaaatcaacagcaaatga

SEQ ID NO: 1737 - DNA, 20 bp, Arachis hypogaea
  source 1..20: mol_type = other DNA
atcaacagcaaatgacggag

SEQ ID NO: 1738 - DNA, 20 bp, Arachis hypogaea
  source 1..20: mol_type = other DNA
atgacggagaggcgacaagt

SEQ ID NO: 1739 - DNA, 20 bp, Arachis hypogaea
  source 1..20: mol_type = other DNA
tgacggagaggcgacaagtt

SEQ ID NO: 1740 - DNA, 20 bp, Arachis hypogaea
  source 1..20: mol_type = other DNA
gaggcgacaagttgggccgc

SEQ ID NO: 1741 - DNA, 20 bp, Arachis hypogaea
  source 1..20: mol_type = other DNA
cgtaccagtttacgagccag

SEQ ID NO: 1742 - DNA, 20 bp, Arachis hypogaea
  source 1..20: mol_type = other DNA
tgggccgctggctcgtaaac

SEQ ID NO: 1743 - DNA, 20 bp, Arachis hypogaea
  source 1..20: mol_type = other DNA
cgctggctcgtaaactggta

SEQ ID NO: 1744 - DNA, 20 bp, Arachis hypogaea
  source 1..20: mol_type = other DNA
tggctcgtaaactggtacgg

SEQ ID NO: 1745 - DNA, 20 bp, Arachis hypogaea
  source 1..20: mol_type = other DNA
gtaaactggtacggaggaag

SEQ ID NO: 1746 - DNA, 20 bp, Arachis hypogaea
  source 1..20: mol_type = other DNA
ctccagttcgatggctgctg

SEQ ID NO: 1747 - DNA, 20 bp, Arachis hypogaea
  source 1..20: mol_type = other DNA
ggccacagcagccatcgaac

SEQ ID NO: 1748 - DNA, 20 bp, Arachis hypogaea
  source 1..20: mol_type = other DNA
ggcagctggctccagttcga

SEQ ID NO: 1749 - DNA, 20 bp, Arachis hypogaea
  source 1..20: mol_type = other DNA
accaatgtagccacggcagc

SEQ ID NO: 1750 - DNA, 20 bp, Arachis hypogaea
  source 1..20: mol_type = other DNA
cgaactggagccagctgccg

SEQ ID NO: 1751 - DNA, 20 bp, Arachis hypogaea
  source 1..20: mol_type = other DNA
gaataccaccaatgtagcca

SEQ ID NO: 1752 - DNA, 20 bp, Arachis hypogaea
  source 1..20: mol_type = other DNA
gccagctgccgtggctacat

SEQ ID NO: 1753 - DNA, 20 bp, Arachis hypogaea
  source 1..20: mol_type = other DNA
agctgccgtggctacattgg

SEQ ID NO: 1754 - DNA, 20 bp, Arachis hypogaea
  source 1..20: mol_type = other DNA
tggctacattggtggtattc

SEQ ID NO: 1755 - DNA, 20 bp, Arachis hypogaea
  source 1..20: mol_type = other DNA
ccagctcagggggttcgaac

SEQ ID NO: 1756 - DNA, 20 bp, Arachis hypogaea
  source 1..20: mol_type = other DNA
gatgtggtatccagctcagg

SEQ ID NO: 1757 - DNA, 20 bp, Arachis hypogaea
  source 1..20: mol_type = other DNA
ccggttcgaaccccctgagc

SEQ ID NO: 1758 - DNA, 20 bp, Arachis hypogaea
  source 1..20: mol_type = other DNA
tgatgtggtatccagctcag

SEQ ID NO: 1759 - DNA, 20 bp, Arachis hypogaea
  source 1..20: mol_type = other DNA
ttgatgtggtatccagctca

SEQ ID NO: 1760 - DNA, 20 bp, Arachis hypogaea
  source 1..20: mol_type = other DNA
gttgatgtggtatccagctc

SEQ ID NO: 1761 - DNA, 20 bp, Arachis hypogaea
  source 1..20: mol_type = other DNA
gctggcaaagctggttgatg

SEQ ID NO: 1762 - DNA, 20 bp, Arachis hypogaea
  source 1..20: mol_type = other DNA
accagagttgctggcaaagc

SEQ ID NO: 1763 - DNA, 20 bp, Arachis hypogaea
  source 1..20: mol_type = other DNA
ggtccgcacaccagagttgc

SEQ ID NO: 1764 - DNA, 20 bp, Arachis hypogaea
  source 1..20: mol_type = other DNA
accagctttgccagcaactc

SEQ ID NO: 1765 - DNA, 20 bp, Arachis hypogaea
  source 1..20: mol_type = other DNA
ttgccagcaactctggtgtg

SEQ ID NO: 1766 - DNA, 20 bp, Arachis hypogaea
  source 1..20: mol_type = other DNA
aactctggtgtgcggacctc

SEQ ID NO: 1767 - DNA, 20 bp, Arachis hypogaea
  source 1..20: mol_type = other DNA
ttgtcggaggcagtttccgg

SEQ ID NO: 1768 - DNA, 20 bp, Arachis hypogaea
  source 1..20: mol_type = other DNA
tctttgtcggaggcagtttc

SEQ ID NO: 1769 - DNA, 20 bp, Arachis hypogaea
  source 1..20: mol_type = other DNA
aagtcatgtttctttgtcgg

SEQ ID NO: 1770 - DNA, 20 bp, Arachis hypogaea
  source 1..20: mol_type = other DNA
tccaagtcatgtttctttgt

SEQ ID NO: 1771 - DNA, 20 bp, Arachis hypogaea
  source 1..20: mol_type = other DNA
tccgacaaagaaacatgact

SEQ ID NO: 1772 - DNA, 20 bp, Arachis hypogaea
  source 1..20: mol_type = other DNA
gacaaagaaacatgacttgg

SEQ ID NO: 1773 - DNA, 20 bp, Arachis hypogaea
  source 1..20: mol_type = other DNA
tctgacgattggtagtgatg

SEQ ID NO: 1774 - DNA, 20 bp, Arachis hypogaea
  source 1..20: mol_type = other DNA
aagtatgattgtctgacgat

SEQ ID NO: 1775 - DNA, 20 bp, Arachis hypogaea
  source 1..20: mol_type = other DNA
agtcacgatcctgcacgata

SEQ ID NO: 1776 - DNA, 20 bp, Arachis hypogaea
  source 1..20: mol_type = other DNA
catacttcaccgtatcgtgc

SEQ ID NO: 1777 - DNA, 20 bp, Arachis hypogaea
  source 1..20: mol_type = other DNA
gtatcgtgcaggatcgtgac

SEQ ID NO: 1778 - DNA, 20 bp, Arachis hypogaea
  source 1..20: mol_type = other DNA
ttggcctggaaggtgcgaag

SEQ ID NO: 1779 - DNA, 20 bp, Arachis hypogaea
  source 1..20: mol_type = other DNA
taatccgcttcgcaccttcc

SEQ ID NO: 1780 - DNA, 20 bp, Arachis hypogaea
  source 1..20: mol_type = other DNA
ctgatgaaacttggcctgga

SEQ ID NO: 1781 - DNA, 20 bp, Arachis hypogaea
  source 1..20: mol_type = other DNA
tgtgctgatgaaacttggcc

SEQ ID NO: 1782 - DNA, 20 bp, Arachis hypogaea
  source 1..20: mol_type = other DNA
agagctgtgctgatgaaact

SEQ ID NO: 1783 - DNA, 20 bp, Arachis hypogaea
  source 1..20: mol_type = other DNA
tcatcagcacagctctaacc

SEQ ID NO: 1784 - DNA, 20 bp, Arachis hypogaea
  source 1..20: mol_type = other DNA
aacgacaagctatgatgacc

SEQ ID NO: 1785 - DNA, 20 bp, Arachis hypogaea
  source 1..20: mol_type = other DNA
taagaatcctctctatattg

SEQ ID NO: 1786 - DNA, 20 bp, Arachis hypogaea
  source 1..20: mol_type = other DNA
cgattcaccacaatatagag

SEQ ID NO: 1787 - DNA, 20 bp, Arachis hypogaea
  source 1..20: mol_type = other DNA
cttatctgtgaacttcactc

SEQ ID NO: 1788 - DNA, 20 bp, Arachis hypogaea
  source 1..20: mol_type = other DNA
atcaagaggaaaactcggtc

SEQ ID NO: 1789 - DNA, 20 bp, Arachis hypogaea
  source 1..20: mol_type = other DNA
gatccatcaagaggaaaact

SEQ ID NO: 1790 - DNA, 20 bp, Arachis hypogaea
  source 1..20: mol_type = other DNA
ggaccgagttttcctcttga

SEQ ID NO: 1791 - DNA, 20 bp, Arachis hypogaea
  source 1..20: mol_type = other DNA
accacaaaggatccatcaag

SEQ ID NO: 1792 - DNA, 20 bp, Arachis hypogaea
  source 1..20: mol_type = other DNA
tcctcttgatggatcctttg

SEQ ID NO: 1793 - DNA, 20 bp, Arachis hypogaea
  source 1..20: mol_type = other DNA
gctgttttggtacaccacaa

SEQ ID NO: 1794 - DNA, 20 bp, Arachis hypogaea
  source 1..20: mol_type = other DNA
ggaggagagttttgctgttt

SEQ ID NO: 1795 - DNA, 20 bp, Arachis hypogaea
  source 1..20: mol_type = other DNA
acgtaacatggctagtgagg

SEQ ID NO: 1796 - DNA, 20 bp, Arachis hypogaea
  source 1..20: mol_type = other DNA
aggacgtaacatggctagtg

SEQ ID NO: 1797 - DNA, 20 bp, Arachis hypogaea
  source 1..20: mol_type = other DNA
tctcattagaggacgtaaca

SEQ ID NO: 1798 - DNA, 20 bp, Arachis hypogaea
  source 1..20: mol_type = other DNA
acgtgaattgctctcattag

SEQ ID NO: 1799 - DNA, 20 bp, Arachis hypogaea
  source 1..20: mol_type = other DNA
ccaggttagttcgaattagt

SEQ ID NO: 1800 - DNA, 20 bp, Arachis hypogaea
  source 1..20: mol_type = other DNA
cctactaattcgaactaacc

SEQ ID NO: 1801 - DNA, 20 bp, Arachis hypogaea
  source 1..20: mol_type = other DNA
catgtatgatggttcgaacc

SEQ ID NO: 1802 - DNA, 20 bp, Arachis hypogaea
  source 1..20: mol_type = other DNA
ggttcgaattacatgtatga

SEQ ID NO: 1803 - DNA, 20 bp, Arachis hypogaea
  source 1..20: mol_type = other DNA
acatgtaattcgaaccaagc

SEQ ID NO: 1804 - DNA, 20 bp, Arachis hypogaea
  source 1..20: mol_type = other DNA
tgtagtaattcgaaccggct

SEQ ID NO: 1805 - DNA, 20 bp, Arachis hypogaea
  source 1..20: mol_type = other DNA
ttggttgtagtaattcgaac

SEQ ID NO: 1806 - DNA, 20 bp, Arachis hypogaea
  source 1..20: mol_type = other DNA
ggttcgaaccaaagagaggt

SEQ ID NO: 1807 - DNA, 20 bp, Arachis hypogaea
  source 1..20: mol_type = other DNA
tactacaaccaacctctctt

SEQ ID NO: 1808 - DNA, 20 bp, Arachis hypogaea
  source 1..20: mol_type = other DNA
aactggttcgaaccaaagag

SEQ ID NO: 1809 - DNA, 20 bp, Arachis hypogaea
  source 1..20: mol_type = other DNA
ctctttggttcgaaccagtt

SEQ ID NO: 1810 - DNA, 20 bp, Arachis hypogaea
  source 1..20: mol_type = other DNA
tttcttggttcgaaccaaac

SEQ ID NO: 1811 - DNA, 20 bp, Arachis hypogaea
  source 1..20: mol_type = other DNA
gttcgaattacatgctttct

SEQ ID NO: 1812 - DNA, 20 bp, Arachis hypogaea
  source 1..20: mol_type = other DNA
gcatgtaattcgaaccagcc

SEQ ID NO: 1813 - DNA, 20 bp, Arachis hypogaea
  source 1..20: mol_type = other DNA
tgtagtaattcgaaccaggc

SEQ ID NO: 1814 - DNA, 20 bp, Arachis hypogaea
  source 1..20: mol_type = other DNA
tggttgtagtaattcgaacc

SEQ ID NO: 1815 - DNA, 20 bp, Arachis hypogaea
  source 1..20: mol_type = other DNA
cgaattatggggagagagct

SEQ ID NO: 1816 - DNA, 20 bp, Arachis hypogaea
  source 1..20: mol_type = other DNA
cctggttggttcgaattatg

SEQ ID NO: 1817 - DNA, 20 bp, Arachis hypogaea
  source 1..20: mol_type = other DNA
acctggttggttcgaattat

SEQ ID NO: 1818 - DNA, 20 bp, Arachis hypogaea
  source 1..20: mol_type = other DNA
aacctggttggttcgaatta

SEQ ID NO: 1819 - DNA, 20 bp, Arachis hypogaea
  source 1..20: mol_type = other DNA
ccccataattcgaaccaacc

SEQ ID NO: 1820 - DNA, 20 bp, Arachis hypogaea
  source 1..20: mol_type = other DNA
gcatgtaattcgaacctggt

SEQ ID NO: 1821 - DNA, 20 bp, Arachis hypogaea
  source 1..20: mol_type = other DNA
gaaagcatgtaattcgaacc

SEQ ID NO: 1822 - DNA, 20 bp, Arachis hypogaea
  source 1..20: mol_type = other DNA
gttcgaattacatgctttct

SEQ ID NO: 1823 - DNA, 20 bp, Arachis hypogaea
  source 1..20: mol_type = other DNA
tttcttggttcgaaccaatc

SEQ ID NO: 1824 - DNA, 20 bp, Arachis hypogaea
  source 1..20: mol_type = other DNA
ctgaataattcgaaccagat

SEQ ID NO: 1825 - DNA, 20 bp, Arachis hypogaea
  source 1..20: mol_type = other DNA
agtagtagttcgaaccatgt

SEQ ID NO: 1826 - DNA, 20 bp, Arachis hypogaea
  source 1..20: mol_type = other DNA
actagtaattcgaaccaaca

SEQ ID NO: 1827 - DNA, 20 bp, Arachis hypogaea
  source 1..20: mol_type = other DNA
taatacagttcgaaccatgc

SEQ ID NO: 1828 - DNA, 20 bp, Arachis hypogaea
  source 1..20: mol_type = other DNA
ttatataaatcgaaccagca

SEQ ID NO: 1829 - DNA, 20 bp, Arachis hypogaea
  source 1..20: mol_type = other DNA
atttatataaaaatgcctct

SEQ ID NO: 1830 - DNA, 20 bp, Arachis hypogaea
  source 1..20: mol_type = other DNA
tgttttagcaataagccaag

SEQ ID NO: 1831 - DNA, 20 bp, Arachis hypogaea
  source 1..20: mol_type = other DNA
tgctaaaacaaatttctgtt

SEQ ID NO: 1832 - DNA, 20 bp, Arachis hypogaea
  source 1..20: mol_type = other DNA
aatttctgtttggcgtattt

SEQ ID NO: 1833 - DNA, 20 bp, Arachis hypogaea
  source 1..20: mol_type = other DNA
tggttaaacttttctgcatg

SEQ ID NO: 1834 - DNA, 20 bp, Arachis hypogaea
  source 1..20: mol_type = other DNA
tttctgcatgtggcttaata

SEQ ID NO: 1835 - DNA, 20 bp, Arachis hypogaea
  source 1..20: mol_type = other DNA
tattttttatatatttttta

SEQ ID NO: 1836 - DNA, 20 bp, Arachis hypogaea
  source 1..20: mol_type = other DNA
atattttttatatatttttt

SEQ ID NO: 1837 - DNA, 20 bp, Arachis hypogaea
  source 1..20: mol_type = other DNA
aaacatacacttaagtctta

SEQ ID NO: 1838 - DNA, 20 bp, Arachis hypogaea
  source 1..20: mol_type = other DNA
aagcgtgcctatcactagga

SEQ ID NO: 1839 - DNA, 20 bp, Arachis hypogaea
  source 1..20: mol_type = other DNA
tctttttccttcctagtgat

SEQ ID NO: 1840 - DNA, 20 bp, Arachis hypogaea
  source 1..20: mol_type = other DNA
tataaagcgtgcctatcact

SEQ ID NO: 1841 - DNA, 20 bp, Arachis hypogaea
  source 1..20: mol_type = other DNA
atatacaaaatatgaaaaat

SEQ ID NO: 1842 - DNA, 20 bp, Arachis hypogaea
  source 1..20: mol_type = other DNA
tatacaaaatatgaaaaatt

SEQ ID NO: 1843 - DNA, 20 bp, Arachis hypogaea
  source 1..20: mol_type = other DNA
gaaaaattgggagttctaga

SEQ ID NO: 1844 - DNA, 20 bp, Arachis hypogaea
  source 1..20: mol_type = other DNA
aaaaattgggagttctagaa

SEQ ID NO: 1845 - DNA, 20 bp, Arachis hypogaea
  source 1..20: mol_type = other DNA
acatgtagtggcatttaaag

SEQ ID NO: 1846 - DNA, 20 bp, Arachis hypogaea
  source 1..20: mol_type = other DNA
aaatgaatgtagacatgtag

SEQ ID NO: 1847 - DNA, 20 bp, Arachis hypogaea
  source 1..20: mol_type = other DNA
gtctacattcattttgtttc

SEQ ID NO: 1848 - DNA, 20 bp, Arachis hypogaea
  source 1..20: mol_type = other DNA
caagttagataatttagaca

SEQ ID NO: 1849 - DNA, 20 bp, Arachis hypogaea
  source 1..20: mol_type = other DNA
atatttgatgcaataaataa

SEQ ID NO: 1850 - DNA, 20 bp, Arachis hypogaea
  source 1..20: mol_type = other DNA
tttatttattgcatcaaata

SEQ ID NO: 1851 - DNA, 20 bp, Arachis hypogaea
  source 1..20: mol_type = other DNA
ttatttattgcatcaaatat

SEQ ID NO: 1852 - DNA, 20 bp, Arachis hypogaea
  source 1..20: mol_type = other DNA
gtaaacattgaatacgactg

SEQ ID NO: 1853 - DNA, 20 bp, Arachis hypogaea
  source 1..20: mol_type = other DNA
tcactttcaagtttcaaata

SEQ ID NO: 1854 - DNA, 20 bp, Arachis hypogaea
  source 1..20: mol_type = other DNA
aaattgtcaaatattgcaat

SEQ ID NO: 1855 - DNA, 20 bp, Arachis hypogaea
  source 1..20: mol_type = other DNA
gggtggaagaatattattag

SEQ ID NO: 1856 - DNA, 20 bp, Arachis hypogaea
  source 1..20: mol_type = other DNA
tcgaagttaagatattcggg

SEQ ID NO: 1857 - DNA, 20 bp, Arachis hypogaea
  source 1..20: mol_type = other DNA
ttttcgaagttaagatattc

SEQ ID NO: 1858 - DNA, 20 bp, Arachis hypogaea
  source 1..20: mol_type = other DNA
attttcgaagttaagatatt

SEQ ID NO: 1859 - DNA, 20 bp, Arachis hypogaea
  source 1..20: mol_type = other DNA
gaatatcttaacttcgaaaa

SEQ ID NO: 1860 - DNA, 20 bp, Arachis hypogaea
  source 1..20: mol_type = other DNA
aatatcttaacttcgaaaat

SEQ ID NO: 1861 - DNA, 20 bp, Arachis hypogaea
  source 1..20: mol_type = other DNA
aataaaagaaaatataaata

SEQ ID NO: 1862 - DNA, 20 bp, Arachis hypogaea
  source 1..20: mol_type = other DNA
atatatataaaattcacaat

SEQ ID NO: 1863 - DNA, 20 bp, Arachis hypogaea
  source 1..20: mol_type = other DNA
taaaattcacaattggtata

SEQ ID NO: 1864 - DNA, 20 bp, Arachis hypogaea
  source 1..20: mol_type = other DNA
ctaaatactattctactcat

SEQ ID NO: 1865 - DNA, 20 bp, Arachis hypogaea
  source 1..20: mol_type = other DNA
aataaaattaaagatatgtt

SEQ ID NO: 1866 - DNA, 20 bp, Arachis hypogaea
  source 1..20: mol_type = other DNA
ttttatttttaaattatttt

SEQ ID NO: 1867 - DNA, 20 bp, Arachis hypogaea
  source 1..20: mol_type = other DNA
aacattaaaaatacccaaca

SEQ ID NO: 1868 - DNA, 20 bp, Arachis hypogaea
  source 1..20: mol_type = other DNA
tttattgtgtctgccatgtt

SEQ ID NO: 1869 - DNA, 20 bp, Arachis hypogaea
  source 1..20: mol_type = other DNA
atttattgtgtctgccatgt

SEQ ID NO: 1870 - DNA, 20 bp, Arachis hypogaea
  source 1..20: mol_type = other DNA
actcctcttaatgaaaatat

SEQ ID NO: 1871 - DNA, 20 bp, Arachis hypogaea
  source 1..20: mol_type = other DNA
gaaccaatattttcattaag

SEQ ID NO: 1872 - DNA, 20 bp, Arachis hypogaea
  source 1..20: mol_type = other DNA
tttcattaagaggagtgtta

SEQ ID NO: 1873 - DNA, 20 bp, Arachis hypogaea
  source 1..20: mol_type = other DNA
ttcattaagaggagtgttaa

SEQ ID NO: 1874 - DNA, 20 bp, Arachis hypogaea
  source 1..20: mol_type = other DNA
ttaagggtcagtcattttta

SEQ ID NO: 1875 - DNA, 20 bp, Arachis hypogaea
  source 1..20: mol_type = other DNA
tactattgatagtcaattga

SEQ ID NO: 1876 - DNA, 20 bp, Arachis hypogaea
  source 1..20: mol_type = other DNA
ttatgtgagattacatctaa

SEQ ID NO: 1877 - DNA, 20 bp, Arachis hypogaea
  source 1..20: mol_type = other DNA
tgtgagattacatctaatgg

SEQ ID NO: 1878 - DNA, 20 bp, Arachis hypogaea
  source 1..20: mol_type = other DNA
gtgagattacatctaatggt

SEQ ID NO: 1879 - DNA, 20 bp, Arachis hypogaea
  source 1..20: mol_type = other DNA
atattactcactttttttta

SEQ ID NO: 1880 - DNA, 20 bp, Arachis hypogaea
  source 1..20: mol_type = other DNA
ttttttttatggttaagtgt

SEQ ID NO: 1881 - DNA, 20 bp, Arachis hypogaea
  source 1..20: mol_type = other DNA
attttaatgagaaagtttag

SEQ ID NO: 1882 - DNA, 20 bp, Arachis hypogaea
  source 1..20: mol_type = other DNA
aattttaatgagaaagttta

SEQ ID NO: 1883 - DNA, 20 bp, Arachis hypogaea
  source 1..20: mol_type = other DNA
aaattttaatgagaaagttt

SEQ ID NO: 1884 - DNA, 20 bp, Arachis hypogaea
  source 1..20: mol_type = other DNA
taaactttctcattaaaatt

SEQ ID NO: 1885 - DNA, 20 bp, Arachis hypogaea
  source 1..20: mol_type = other DNA
attactcatttttcttttgt

SEQ ID NO: 1886 - DNA, 20 bp, Arachis hypogaea
  source 1..20: mol_type = other DNA
catcaataatagctaattga

SEQ ID NO: 1887 - DNA, 20 bp, Arachis hypogaea
  source 1..20: mol_type = other DNA
ttacaaattataaaatttgc

SEQ ID NO: 1888 - DNA, 20 bp, Arachis hypogaea
  source 1..20: mol_type = other DNA
attttaataagaagagtatt

SEQ ID NO: 1889 - DNA, 20 bp, Arachis hypogaea
  source 1..20: mol_type = other DNA
aatactcttcttattaaaat

SEQ ID NO: 1890 - DNA, 20 bp, Arachis hypogaea
  source 1..20: mol_type = other DNA
caagggaattgcagatggaa

SEQ ID NO: 1891 - DNA, 20 bp, Arachis hypogaea
  source 1..20: mol_type = other DNA
ggggtcaagggaattgcaga

SEQ ID NO: 1892 - DNA, 20 bp, Arachis hypogaea
  source 1..20: mol_type = other DNA
taggcatataatggggtcaa

SEQ ID NO: 1893 - DNA, 20 bp, Arachis hypogaea
  source 1..20: mol_type = other DNA
ataggcatataatggggtca

SEQ ID NO: 1894 - DNA, 20 bp, Arachis hypogaea
  source 1..20: mol_type = other DNA
ctatttataggcatataatg

SEQ ID NO: 1895 - DNA, 20 bp, Arachis hypogaea
  source 1..20: mol_type = other DNA
tctatttataggcatataat

SEQ ID NO: 1896 - DNA, 20 bp, Arachis hypogaea
  source 1..20: mol_type = other DNA
ttctatttataggcatataa

SEQ ID NO: 1897 - DNA, 20 bp, Arachis hypogaea
  source 1..20: mol_type = other DNA
gaggagtggcttctatttat

SEQ ID NO: 1898 - DNA, 20 bp, Arachis hypogaea
  source 1..20: mol_type = other DNA
gtggttgatgagcagaggag

SEQ ID NO: 1899 - DNA, 20 bp, Arachis hypogaea
  source 1..20: mol_type = other DNA
agtgtgtggttgatgagcag

SEQ ID NO: 1900 - DNA, 20 bp, Arachis hypogaea
  source 1..20: mol_type = other DNA
gaggttagatttgtagtgtg

SEQ ID NO: 1901 - DNA, 20 bp, Arachis hypogaea
  source 1..20: mol_type = other DNA
gaagtagatagtaataagtg

SEQ ID NO: 1902 - DNA, 20 bp, Arachis hypogaea
  source 1..20: mol_type = other DNA
aagctaagggaaggaatgaa

SEQ ID NO: 1903 - DNA, 20 bp, Arachis hypogaea
  source 1..20: mol_type = other DNA
tgagttaagaagctaaggga

SEQ ID NO: 1904 - DNA, 20 bp, Arachis hypogaea
  source 1..20: mol_type = other DNA
tgactgagttaagaagctaa

SEQ ID NO: 1905 - DNA, 20 bp, Arachis hypogaea
  source 1..20: mol_type = other DNA
atgactgagttaagaagcta

SEQ ID NO: 1906 - DNA, 20 bp, Arachis hypogaea
  source 1..20: mol_type = other DNA
ttagcttcttaactcagtca

SEQ ID NO: 1907 - DNA, 20 bp, Arachis hypogaea
  source 1..20: mol_type = other DNA
tagcttcttaactcagtcat

SEQ ID NO: 1908 - DNA, 20 bp, Arachis hypogaea
  source 1..20: mol_type = other DNA
catgggcgtcttcacttttg

SEQ ID NO: 1909 - DNA, 20 bp, Arachis hypogaea
  source 1..20: mol_type = other DNA
cttagcagggggcagggtgg

SEQ ID NO: 1910 - DNA, 20 bp, Arachis hypogaea
  source 1..20: mol_type = other DNA
aagcttagcagggggcaggg

SEQ ID NO: 1911 - DNA, 20 bp, Arachis hypogaea
  source 1..20: mol_type = other DNA
gtaaagcttagcagggggca

SEQ ID NO: 1912 - DNA, 20 bp, Arachis hypogaea
  source 1..20: mol_type = other DNA
tgtaaagcttagcagggggc

SEQ ID NO: 1913 - DNA, 20 bp, Arachis hypogaea
  source 1..20: mol_type = other DNA
gcgttgtaaagcttagcagg

SEQ ID NO: 1914 - DNA, 20 bp, Arachis hypogaea
  source 1..20: mol_type = other DNA
agcgttgtaaagcttagcag

SEQ ID NO: 1915 - DNA, 20 bp, Arachis hypogaea
  source 1..20: mol_type = other DNA
gagcgttgtaaagcttagca

SEQ ID NO: 1916 - DNA, 20 bp, Arachis hypogaea
  source 1..20: mol_type = other DNA
agagcgttgtaaagcttagc

SEQ ID NO: 1917 - DNA, 20 bp, Arachis hypogaea
  source 1..20: mol_type = other DNA
taagctttacaacgctctga

SEQ ID NO: 1918 - DNA, 20 bp, Arachis hypogaea
  source 1..20: mol_type = other DNA
aatcttaggggtgatggtat

SEQ ID NO: 1919 - DNA, 20 bp, Arachis hypogaea
  source 1..20: mol_type = other DNA
atcaataatcttaggggtga

SEQ ID NO: 1920 - DNA, 20 bp, Arachis hypogaea
  source 1..20: mol_type = other DNA
gacgtcatcaataatcttag

SEQ ID NO: 1921 - DNA, 20 bp, Arachis hypogaea
  source 1..20: mol_type = other DNA
tgacgtcatcaataatctta

SEQ ID NO: 1922 - DNA, 20 bp, Arachis hypogaea
  source 1..20: mol_type = other DNA
ttgacgtcatcaataatctt

SEQ ID NO: 1923 - DNA, 20 bp, Arachis hypogaea
  source 1..20: mol_type = other DNA
caagagtgttgaaatcgttg

SEQ ID NO: 1924 - DNA, 20 bp, Arachis hypogaea
  source 1..20: mol_type = other DNA
aagagtgttgaaatcgttga

SEQ ID NO: 1925 - DNA, 20 bp, Arachis hypogaea
  source 1..20: mol_type = other DNA
gttgaaatcgttgagggaaa

SEQ ID NO: 1926 - DNA, 20 bp, Arachis hypogaea
  source 1..20: mol_type = other DNA
gaaatcgttgagggaaacgg

SEQ ID NO: 1927 - DNA, 20 bp, Arachis hypogaea
  source 1..20: mol_type = other DNA
gttgagggaaacggtggtcc

SEQ ID NO: 1928 - DNA, 20 bp, Arachis hypogaea
  source 1..20: mol_type = other DNA
gtgagtttcttgatggttcc

SEQ ID NO: 1929 - DNA, 20 bp, Arachis hypogaea
  source 1..20: mol_type = other DNA
gacaatggtgagtttcttga

SEQ ID NO: 1930 - DNA, 20 bp, Arachis hypogaea
  source 1..20: mol_type = other DNA
caagaaactcaccattgtcg

SEQ ID NO: 1931 - DNA, 20 bp, Arachis hypogaea
  source 1..20: mol_type = other DNA
tagttactgaccctcgacaa

SEQ ID NO: 1932 - DNA, 20 bp, Arachis hypogaea
  source 1..20: mol_type = other DNA
aagaaactcaccattgtcga

SEQ ID NO: 1933 - DNA, 20 bp, Arachis hypogaea
  source 1..20: mol_type = other DNA
atagaccgagatcgtttaca

SEQ ID NO: 1934 - DNA, 20 bp, Arachis hypogaea
  source 1..20: mol_type = other DNA
gatctccatgtaaacgatct

SEQ ID NO: 1935 - DNA, 20 bp, Arachis hypogaea
  source 1..20: mol_type = other DNA
atatacataacagagcacaa

SEQ ID NO: 1936 - DNA, 20 bp, Arachis hypogaea
  source 1..20: mol_type = other DNA
cttgtcccactaaatagggt

SEQ ID NO: 1937 - DNA, 20 bp, Arachis hypogaea
  source 1..20: mol_type = other DNA
aagtcttgtcccactaaata

SEQ ID NO: 1938 - DNA, 20 bp, Arachis hypogaea
  source 1..20: mol_type = other DNA
atgtagccgaccctatttag

SEQ ID NO: 1939 - DNA, 20 bp, Arachis hypogaea
  source 1..20: mol_type = other DNA
aaagtcttgtcccactaaat

SEQ ID NO: 1940 - DNA, 20 bp, Arachis hypogaea
  source 1..20: mol_type = other DNA
tgtagccgaccctatttagt

SEQ ID NO: 1941 - DNA, 20 bp, Arachis hypogaea
  source 1..20: mol_type = other DNA
gtatgtacatgaaataaata

SEQ ID NO: 1942 - DNA, 20 bp, Arachis hypogaea
  source 1..20: mol_type = other DNA
tatgtacatgaaataaatat

SEQ ID NO: 1943 - DNA, 20 bp, Arachis hypogaea
  source 1..20: mol_type = other DNA
aatgatgatatatatgcaga

SEQ ID NO: 1944 - DNA, 20 bp, Arachis hypogaea
  source 1..20: mol_type = other DNA
caccttgtgcaagataaact

SEQ ID NO: 1945 - DNA, 20 bp, Arachis hypogaea
  source 1..20: mol_type = other DNA
aaccaagtttatcttgcaca

SEQ ID NO: 1946 - DNA, 20 bp, Arachis hypogaea
  source 1..20: mol_type = other DNA
caagtttatcttgcacaagg

SEQ ID NO: 1947 - DNA, 20 bp, Arachis hypogaea
  source 1..20: mol_type = other DNA
caaggtggagtcaatagatg

SEQ ID NO: 1948 - DNA, 20 bp, Arachis hypogaea
  source 1..20: mol_type = other DNA
gctgtagttgtatgcatagt

SEQ ID NO: 1949 - DNA, 20 bp, Arachis hypogaea
  source 1..20: mol_type = other DNA
gcatacaactacagcgttgt

SEQ ID NO: 1950 - DNA, 20 bp, Arachis hypogaea
  source 1..20: mol_type = other DNA
tacaactacagcgttgttgg

SEQ ID NO: 1951 - DNA, 20 bp, Arachis hypogaea
  source 1..20: mol_type = other DNA
ctacagcgttgttggaggag

SEQ ID NO: 1952 - DNA, 20 bp, Arachis hypogaea
  source 1..20: mol_type = other DNA
aggagtggctctgcctccca

SEQ ID NO: 1953 - DNA, 20 bp, Arachis hypogaea
  source 1..20: mol_type = other DNA
gttatcttctccgccgtggg

SEQ ID NO: 1954 - DNA, 20 bp, Arachis hypogaea
  source 1..20: mol_type = other DNA
agtggctctgcctcccacgg

SEQ ID NO: 1955 - DNA, 20 bp, Arachis hypogaea
  source 1..20: mol_type = other DNA
aatgttatcttctccgccgt

SEQ ID NO: 1956 - DNA, 20 bp, Arachis hypogaea
  source 1..20: mol_type = other DNA
aaatgttatcttctccgccg

SEQ ID NO: 1957 - DNA, 20 bp, Arachis hypogaea
  source 1..20: mol_type = other DNA
gataacatttgagacaaagc

SEQ ID NO: 1958 - DNA, 20 bp, Arachis hypogaea
  source 1..20: mol_type = other DNA
tttgagacaaagctggttga

SEQ ID NO: 1959 - DNA, 20 bp, Arachis hypogaea
  source 1..20: mol_type = other DNA
aagctggttgaaggacccaa

SEQ ID NO: 1960 - DNA, 4494 bp, Arachis hypogaea
  source 1..4494: mol_type = genomic DNA
ttggtatcaggacctttaacactgtcttctacttagttcaaatttatccatattcatataagtttcaataattacaaagctacaaagctaaattaaaagttgaacaatttaaaagaaaacacaaacttgcatggaaatcccagcatcgacaagagacaaagttgcagcattgatacacgcagatctagttcctacacagcaatattggggaagaattagtgaatggtaaaaaaaatagtcttttaaatacaaaaaaaagtaaagatccaagagaatattagataaacataaaaaagggctgcttagggttccttccattcttctttctaattcaggattgccggcaaaatcttgattttcgctattttgggaccttctttggtgacttaacgctgaatttaccaaggatacagagaaactgaacaatagtgtgaacctgtgagggagttcttccaattttctagtgagtgggctttacttttaagtttttcgcccaaaatttcacttgtaaaagttcatttgagtttatttcagttaagtaattgagatttttaatttaaattaatagttaactataaaaaatatataaattataatatataccgtatttcaaagacggtacatactaattactgtttcaaaaataaacttatgttaatttatgttggatattgtttttactaaattgataaaaagataataaaaaaataaaaaaataaaatttaggaaaactaatgcatattgtaaattagagacaaaaaaaaatgtaccttttttatcatgaattttatatatacttttaacattcattctcaattaattaaagtaataagtatgtactttttttatactatttcaactaatgcatcttctagtcaccaaaaaaattaatgcatcttcggttactcaatgctgaatttactaaggatacggagaaactgaataatagtctgaacatgtgagagagttcttccgattttctagtgagtgggctttactttggtgctaagtgaaagttatttttttccgcccaaaatttcacttgtgtattgtaaacgttcatttgaatttatttcagtcaagtaattaagatttttaatttaaattaatagttaactataataaaaaatataaaattataattatatatcataattcaaagacggtacatactaattaggattatggattttgactcggatttaaaaaaaaaaaaaaagattgccagagaaaaaaaaatattaaaattttgtaactatttcaaaaataaacctacattaacttatgtcggatattttttttattaaattaataaaaaaataaaaaatagaaaaataaaatttaggaaaattaatacatattgtgaattagagacaaaaaaaaatgtactctttttattataaattttatatttttattattcattctcaatttaattagagttataagtatgtactctttttatattattccaactaatgcatatcttatcaattgaaaatggctggaaaggagagagaaaaaatcacccttaaaaattgaaatttattattaaagtttaaatttggaaaaaataggaactgcctataaaatttttgaaagggatggaaggaaacactagaagcgcgtaatttaaaagtagacatcgtttgatttcgtttgatttcgccacggtgagcattgggtctgtggtaattgagagagtccaatttaaattggccacagacaaacaaaaacgtgggaaactttcgcacaatttaaccacgaaaaagtaaaacgttgcaagtgattacgacgatcatgaaaatttgccactacttcttgttcgtgagtatttttccgtggtaaactaccgtgtttctggtagtgtaagttggatatttcttgtcatcctttggatttgaagaactggttcttgtatcatagcagagagcatccgttcaagttcttttcgggactttggtggatatggcgagcaaggaataatgacatctttaatcccgatgaaacttggcctccggaaaaagtgatttgtctggcattaacttcagaaaaggagcttaggaatatctttgaattacaacgtatgtcccttccctctactctaaatggtttttggaatcccccatccattggtacttttaagattaattgtgatgctagttattttggttcgggtgatagtgttggttttgcttgtgttattagagattgtaatgggagctggcaaagggggtgtttgggaatgattgagagtaataatattcttcaaggagaattgtttgctatttggagaggatatctcttagcttgggatgtgggtcaacgagatgttatttgtgagacggattgtgtggaagcatttaatcttgttactcaagatggttttgggtttattgatccactggtgctcaaaataagagatatcatgcattggaattggcgggttgactttcgtttgattatgagagatgcaaacacggtggcagatactatggcaaagatggcgatgaagttaaaactttcgcatgtggagtttctttcaccttgggaggagtttaagagtagtcttaaacgggactgtccatctatttagacagttccttgttttgtttgttttgtttttctttgtttaatttatttcagtcaccaaaaaaaattaattcgagttggtcgagtagtgaattcactttttcgtttaagcaagcgtgagatttaaatcccaacttgtgcatgtaatgtttcattagttcttgataataaacttttaaataaaactcatatccacaacaaattaatcaatgatttatcgaactgaaaaatacaacaaattaatcgttgacttatcaaactgaaaacactgtaaacaataaaaataaattaaataagataattttgaatggtagtctctctttccccattattgatttctcctattcttttcactaattaaccacagcactctcataatctcatgatcccccacttctatataaagagaacaccttgcaccacttcaggtcaccaaattcaagctttcaacactccaaaacacacttagcttttatttcacatacatcactacttcttcttcttcttcttcttgttcatattataattaatggcaagcctcaagtttgcatttgtgatgcttgtgtgcatggccatggtgggagcaccaatggtgaatgccatatcatgtggccaagtgaacagtgccctagcaccatgcatccctttcctcacaaagggtggagctcctcctccggcttgttgcagcggagttagaggccttctcggtgctttaagaaccaccgcagaccgccaggccgcctgtaactgcctcaaagccgctgccggttcccttcgtggcctcaaccaaggcaacgccgccgccctccctggaagatgcggtgtcagcattccttacaagatcagcacctccaccaactgtgctacgtatgtttctaactttcactctctttccttttttatttatttcttaatttttggttttcaaacatatctaatgcaaccttcaataattagtattactattaatgttaactcttaaccgtcagcaacttttagtaattttacttagcatttaatcggtgtaaatatcaaattatttttaataaataaattttattaatttatgaaaataaattttaataaatatatatgagtataaattatattgatttaaaatataatataataattttgtccgtggattatttatttaaggacaaatagttagctatcggtgctctcttctcttttattctaatcttgctatatcatgcttataataagtgtattaatatttcttataatatgtctaatccttttaataaaaaattggattatataaattacctgctagtttttttctcaaatttttaatcaggtttcattatagtttgaaagtttatttgtaattaaatttttgtattagataaaatttttaattaagttctctttaattttttgttaaaaaaattataatatttttggaatatattttttattgttattcattgttatgctgttacaatatgtttattttaggattttctcactatgaaaactaatttgaagatgttaataaacacatatatttaagaaaaaataaatcaactattattttggacatgtaaaattaaatatcttaattcatttttttgatgttgcgatgttacagcattaagttctgaggagaggaagacgaagaaggtggctctagccagcactggacacaagtagttatgtgaaagcagcttatattaattattaactaatgagaataaaaatgagggtgatgatgagggctatatacatatacccctctcctcttgtagtctttgtatgaggtgggaatggattctcttatttttttttttttttttttggttatgcatatggagttgttacttgtttcaacttccacactacctacagcaatcaatgaagctgcttttatttggttaa

SEQ ID NO: 1961 - protein, 116 aa, Arachis hypogaea
MASLKFAFVMLVCMAMVGAPMVNAISCGQVNSALAPCIPFLTKGGAPPPACCSGVRGLLGALRTTADRQAACNCLKAAAGSLRGLNQGNAAALPGRCGVSIPYKISTSTNCATIKF

SEQ ID NO: 1962 - DNA, 20 bp, Arachis hypogaea
  source 1..20: mol_type = other DNA
taagtagaagacagtgttaa

SEQ ID NO: 1963 - DNA, 20 bp, Arachis hypogaea
  source 1..20: mol_type = other DNA
tattgaaacttatatgaata

SEQ ID NO: 1964 - DNA, 20 bp, Arachis hypogaea
  source 1..20: mol_type = other DNA
aaagaaaacacaaacttgca

SEQ ID NO: 1965 - DNA, 20 bp, Arachis hypogaea
  source 1..20: mol_type = other DNA
ctttgtctcttgtcgatgct

SEQ ID NO: 1966 - DNA, 20 bp, Arachis hypogaea
  source 1..20: mol_type = other DNA
actttgtctcttgtcgatgc

SEQ ID NO: 1967 - DNA, 20 bp, Arachis hypogaea
  source 1..20: mol_type = other DNA
cttccccaatattgctgtgt

SEQ ID NO: 1968 - DNA, 20 bp, Arachis hypogaea
  source 1..20: mol_type = other DNA
tagttcctacacagcaatat

SEQ ID NO: 1969 - DNA, 20 bp, Arachis hypogaea
  source 1..20: mol_type = other DNA
agttcctacacagcaatatt

SEQ ID NO: 1970 - DNA, 20 bp, Arachis hypogaea
  source 1..20: mol_type = other DNA
gttcctacacagcaatattg

SEQ ID NO: 1971 - DNA, 20 bp, Arachis hypogaea
  source 1..20: mol_type = other DNA
attggggaagaattagtgaa

SEQ ID NO: 1972 - DNA, 20 bp, Arachis hypogaea
  source 1..20: mol_type = other DNA
atgtttatctaatattctct

SEQ ID NO: 1973 - DNA, 20 bp, Arachis hypogaea
  source 1..20: mol_type = other DNA
atattagataaacataaaaa

SEQ ID NO: 1974 - DNA, 20 bp, Arachis hypogaea
  source 1..20: mol_type = other DNA
tattagataaacataaaaaa

SEQ ID NO: 1975 - DNA, 20 bp, Arachis hypogaea
  source 1..20: mol_type = other DNA
aacataaaaaagggctgctt

SEQ ID NO: 1976 - DNA, 20 bp, Arachis hypogaea
  source 1..20: mol_type = other DNA
acataaaaaagggctgctta

SEQ ID NO: 1977 - DNA, 20 bp, Arachis hypogaea
  source 1..20: mol_type = other DNA
gaattagaaagaagaatgga

SEQ ID NO: 1978 - DNA, 20 bp, Arachis hypogaea
  source 1..20: mol_type = other DNA
tcctgaattagaaagaagaa

SEQ ID NO: 1979 - DNA, 20 bp, Arachis hypogaea
  source 1..20: mol_type = other DNA
tccattcttctttctaattc

SEQ ID NO: 1980 - DNA, 20 bp, Arachis hypogaea
  source 1..20: mol_type = other DNA
tctttctaattcaggattgc

SEQ ID NO: 1981 - DNA, 20 bp, Arachis hypogaea
  source 1..20: mol_type = other DNA
agcgaaaatcaagattttgc

SEQ ID NO: 1982 - DNA, 20 bp, Arachis hypogaea
  source 1..20: mol_type = other DNA
aatcttgattttcgctattt

SEQ ID NO: 1983 - DNA, 20 bp, Arachis hypogaea
  source 1..20: mol_type = other DNA
atcttgattttcgctatttt

SEQ ID NO: 1984 - DNA, 20 bp, Arachis hypogaea
  source 1..20: mol_type = other DNA
cgctattttgggaccttctt

SEQ ID NO: 1985 - DNA, 20 bp, Arachis hypogaea
  source 1..20: mol_type = other DNA
cagcgttaagtcaccaaaga

SEQ ID NO: 1986 - DNA, 20 bp, Arachis hypogaea
  source 1..20: mol_type = other DNA
acttaacgctgaatttacca

SEQ ID NO: 1987 - DNA, 20 bp, Arachis hypogaea
  source 1..20: mol_type = other DNA
gttcagtttctctgtatcct

SEQ ID NO: 1988 - DNA, 20 bp, Arachis hypogaea
  source 1..20: mol_type = other DNA
aacaatagtgtgaacctgtg

SEQ ID NO: 1989 - DNA, 20 bp, Arachis hypogaea
  source 1..20: mol_type = other DNA
acaatagtgtgaacctgtga

SEQ ID NO: 1990 - DNA, 20 bp, Arachis hypogaea
  source 1..20: mol_type = other DNA
aattggaagaactccctcac

SEQ ID NO: 1991 - DNA, 20 bp, Arachis hypogaea
  source 1..20: mol_type = other DNA
aagcccactcactagaaaat

SEQ ID NO: 1992 - DNA, 20 bp, Arachis hypogaea
  source 1..20: mol_type = other DNA
tcttccaattttctagtgag

SEQ ID NO: 1993 - DNA, 20 bp, Arachis hypogaea
  source 1..20: mol_type = other DNA
cttccaattttctagtgagt

SEQ ID NO: 1994 - DNA, 20 bp, Arachis hypogaea
  source 1..20: mol_type = other DNA
acttttacaagtgaaatttt

SEQ ID NO: 1995 - DNA, 20 bp, Arachis hypogaea
  source 1..20: mol_type = other DNA
aacttttacaagtgaaattt

SEQ ID NO: 1996 - DNA, 20 bp, Arachis hypogaea
  source 1..20: mol_type = other DNA
tatgtaccgtctttgaaata

SEQ ID NO: 1997 - DNA, 20 bp, Arachis hypogaea
  source 1..20: mol_type = other DNA
tatataccgtatttcaaaga

SEQ ID NO: 1998 - DNA, 20 bp, Arachis hypogaea
  source 1..20: mol_type = other DNA
aaacttatgttaatttatgt

SEQ ID NO: 1999 - DNA, 20 bp, Arachis hypogaea
  source 1..20: mol_type = other DNA
aaaataaaaaaataaaattt

SEQ ID NO: 2000 - DNA, 20 bp, Arachis hypogaea
  source 1..20: mol_type = other DNA
tataaaattcatgataaaaa

SEQ ID NO: 2001 - DNA, 20 bp, Arachis hypogaea
  source 1..20: mol_type = other DNA
cgaagatgcattaatttttt

SEQ ID NO: 2002 - DNA, 20 bp, Arachis hypogaea
  source 1..20: mol_type = other DNA
caaaaaaattaatgcatctt

SEQ ID NO: 2003 - DNA, 20 bp, Arachis hypogaea
  source 1..20: mol_type = other DNA
actcaatgctgaatttacta

SEQ ID NO: 2004 - DNA, 20 bp, Arachis hypogaea
  source 1..20: mol_type = other DNA
tgctgaatttactaaggata

SEQ ID NO: 2005 - DNA, 20 bp, Arachis hypogaea
  source 1..20: mol_type = other DNA
aagcccactcactagaaaat

SEQ ID NO: 2006 - DNA, 20 bp, Arachis hypogaea
  source 1..20: mol_type = other DNA
tcttccgattttctagtgag

SEQ ID NO: 2007 - DNA, 20 bp, Arachis hypogaea
  source 1..20: mol_type = other DNA
cttccgattttctagtgagt

SEQ ID NO: 2008 - DNA, 20 bp, Arachis hypogaea
  source 1..20: mol_type = other DNA
ctagtgagtgggctttactt

SEQ ID NO: 2009 - DNA, 20 bp, Arachis hypogaea
  source 1..20: mol_type = other DNA
tacacaagtgaaattttggg

SEQ ID NO: 2010 - DNA, 20 bp, Arachis hypogaea
  source 1..20: mol_type = other DNA
caatacacaagtgaaatttt

SEQ ID NO: 2011 - DNA, 20 bp, Arachis hypogaea
  source 1..20: mol_type = other DNA
acaatacacaagtgaaattt

SEQ ID NO: 2012 - DNA, 20 bp, Arachis hypogaea
  source 1..20: mol_type = other DNA
tatatatcataattcaaaga

SEQ ID NO: 2013 - DNA, 20 bp, Arachis hypogaea
  source 1..20: mol_type = other DNA
aaagacggtacatactaatt

SEQ ID NO: 2014 - DNA, 20 bp, Arachis hypogaea
  source 1..20: mol_type = other DNA
gtacatactaattaggatta

SEQ ID NO: 2015 - DNA, 20 bp, Arachis hypogaea
  source 1..20: mol_type = other DNA
taggattatggattttgact

SEQ ID NO: 2016 - DNA, 20 bp, Arachis hypogaea
  source 1..20: mol_type = other DNA
ttttaatatttttttttctc

SEQ ID NO: 2017 - DNA, 20 bp, Arachis hypogaea
  source 1..20: mol_type = other DNA
tatccgacataagttaatgt

SEQ ID NO: 2018 - DNA, 20 bp, Arachis hypogaea
  source 1..20: mol_type = other DNA
aaacctacattaacttatgt

SEQ ID NO: 2019 - DNA, 20 bp, Arachis hypogaea
  source 1..20: mol_type = other DNA
aaaatagaaaaataaaattt

SEQ ID NO: 2020 - DNA, 20 bp, Arachis hypogaea
  source 1..20: mol_type = other DNA
ttgataagatatgcattagt

SEQ ID NO: 2021 - DNA, 20 bp, Arachis hypogaea
  source 1..20: mol_type = other DNA
catatcttatcaattgaaaa

SEQ ID NO: 2022 - DNA, 20 bp, Arachis hypogaea
  source 1..20: mol_type = other DNA
tcttatcaattgaaaatggc

SEQ ID NO: 2023 - DNA, 20 bp, Arachis hypogaea
  source 1..20: mol_type = other DNA
tcaattgaaaatggctggaa

SEQ ID NO: 2024 - DNA, 20 bp, Arachis hypogaea
  source 1..20: mol_type = other DNA
taataaatttcaatttttaa

SEQ ID NO: 2025 - DNA, 20 bp, Arachis hypogaea
  source 1..20: mol_type = other DNA
ataataaatttcaattttta

SEQ ID NO: 2026 - DNA, 20 bp, Arachis hypogaea
  source 1..20: mol_type = other DNA
ttattattaaagtttaaatt

SEQ ID NO: 2027 - DNA, 20 bp, Arachis hypogaea
  source 1..20: mol_type = other DNA
agtttaaatttggaaaaaat

SEQ ID NO: 2028 - DNA, 20 bp, Arachis hypogaea
  source 1..20: mol_type = other DNA
atccctttcaaaaattttat

SEQ ID NO: 2029 - DNA, 20 bp, Arachis hypogaea
  source 1..20: mol_type = other DNA
ctgcctataaaatttttgaa

SEQ ID NO: 2030 - DNA, 20 bp, Arachis hypogaea
  source 1..20: mol_type = other DNA
tgcctataaaatttttgaaa

SEQ ID NO: 2031 - DNA, 20 bp, Arachis hypogaea
  source 1..20: mol_type = other DNA
tataaaatttttgaaaggga

SEQ ID NO: 2032 - DNA, 20 bp, Arachis hypogaea
  source 1..20: mol_type = other DNA
aaatttttgaaagggatgga

SEQ ID NO: 2033 - DNA, 20 bp, Arachis hypogaea
  source 1..20: mol_type = other DNA
gatttcgtttgatttcgcca

SEQ ID NO: 2034 - DNA, 20 bp, Arachis hypogaea
  source 1..20: mol_type = other DNA
cacagacccaatgctcaccg

SEQ ID NO: 2035 - DNA, 20 bp, Arachis hypogaea
  source 1..20: mol_type = other DNA
gatttcgccacggtgagcat

SEQ ID NO: 2036 - DNA, 20 bp, Arachis hypogaea
  source 1..20: mol_type = other DNA
atttcgccacggtgagcatt

SEQ ID NO: 2037 - DNA, 20 bp, Arachis hypogaea
  source 1..20: mol_type = other DNA
cacggtgagcattgggtctg

SEQ ID NO: 2038 - DNA, 20 bp, Arachis hypogaea
  source 1..20: mol_type = other DNA
tgtctgtggccaatttaaat

SEQ ID NO: 2039 - DNA, 20 bp, Arachis hypogaea
  source 1..20: mol_type = other DNA
tgagagagtccaatttaaat

SEQ ID NO: 2040 - DNA, 20 bp, Arachis hypogaea
  source 1..20: mol_type = other DNA
cccacgtttttgtttgtctg

SEQ ID NO: 2041 - DNA, 20 bp, Arachis hypogaea
  source 1..20: mol_type = other DNA
gccacagacaaacaaaaacg

SEQ ID NO: 2042 - DNA, 20 bp, Arachis hypogaea
  source 1..20: mol_type = other DNA
ccacagacaaacaaaaacgt

SEQ ID NO: 2043 - DNA, 20 bp, Arachis hypogaea
  source 1..20: mol_type = other DNA
tgcaacgttttactttttcg

SEQ ID NO: 2044 - DNA, 20 bp, Arachis hypogaea
  source 1..20: mol_type = other DNA
tactcacgaacaagaagtag

SEQ ID NO: 2045 - DNA, 20 bp, Arachis hypogaea
  source 1..20: mol_type = other DNA
tgttcgtgagtatttttccg

SEQ ID NO: 2046 - DNA, 20 bp, Arachis hypogaea
  source 1..20: mol_type = other DNA
agaaacacggtagtttacca

SEQ ID NO: 2047 - DNA, 20 bp, Arachis hypogaea
  source 1..20: mol_type = other DNA
gtggtaaactaccgtgtttc

SEQ ID NO: 2048 - DNA, 20 bp, Arachis hypogaea
  source 1..20: mol_type = other DNA
aacttacactaccagaaaca

SEQ ID NO: 2049 - DNA, 20 bp, Arachis hypogaea
  source 1..20: mol_type = other DNA
gtgtttctggtagtgtaagt

SEQ ID NO: 2050 - DNA, 20 bp, Arachis hypogaea
  source 1..20: mol_type = other DNA
ggatatttcttgtcatcctt

SEQ ID NO: 2051 - DNA, 20 bp, Arachis hypogaea
  source 1..20: mol_type = other DNA
aaccagttcttcaaatccaa

SEQ ID NO: 2052 - DNA, 20 bp, Arachis hypogaea
  source 1..20: mol_type = other DNA
atcctttggatttgaagaac

SEQ ID NO: 2053 - DNA, 20 bp, Arachis hypogaea
  source 1..20: mol_type = other DNA
agtcccgaaaagaacttgaa

SEQ ID NO: 2054 - DNA, 20 bp, Arachis hypogaea
  source 1..20: mol_type = other DNA
gcatccgttcaagttctttt

SEQ ID NO: 2055 - DNA, 20 bp, Arachis hypogaea
  source 1..20: mol_type = other DNA
catccgttcaagttcttttc

SEQ ID NO: 2056 - DNA, 20 bp, Arachis hypogaea
  source 1..20: mol_type = other DNA
tcaagttcttttcgggactt

SEQ ID NO: 2057 - DNA, 20 bp, Arachis hypogaea
  source 1..20: mol_type = other DNA
agttcttttcgggactttgg

SEQ ID NO: 2058 - DNA, 20 bp, Arachis hypogaea
  source 1..20: mol_type = other DNA
tttcgggactttggtggata

SEQ ID NO: 2059 - DNA, 20 bp, Arachis hypogaea
  source 1..20: mol_type = other DNA
tttggtggatatggcgagca

SEQ ID NO: 2060 - DNA, 20 bp, Arachis hypogaea
  source 1..20: mol_type = other DNA
tccggaggccaagtttcatc

SEQ ID NO: 2061 - DNA, 20 bp, Arachis hypogaea
  source 1..20: mol_type = other DNA
ttccggaggccaagtttcat

SEQ ID NO: 2062 - DNA, 20 bp, Arachis hypogaea
  source 1..20: mol_type = other DNA
tctttaatcccgatgaaact

SEQ ID NO: 2063 - DNA, 20 bp, Arachis hypogaea
  source 1..20: mol_type = other DNA
tcccgatgaaacttggcctc

SEQ ID NO: 2064 - DNA, 20 bp, Arachis hypogaea
  source 1..20: mol_type = other DNA
agacaaatcactttttccgg

SEQ ID NO: 2065 - DNA, 20 bp, Arachis hypogaea
  source 1..20: mol_type = other DNA
gccagacaaatcactttttc

SEQ ID NO: 2066 - DNA, 20 bp, Arachis hypogaea
  source 1..20: mol_type = other DNA
tccggaaaaagtgatttgtc

SEQ ID NO: 2067 - DNA, 20 bp, Arachis hypogaea
  source 1..20: mol_type = other DNA
tctggcattaacttcagaaa

SEQ ID NO: 2068 - DNA, 20 bp, Arachis hypogaea
  source 1..20: mol_type = other DNA
taacttcagaaaaggagctt

SEQ ID NO: 2069 - DNA, 20 bp, Arachis hypogaea
  source 1..20: mol_type = other DNA
accatttagagtagagggaa

SEQ ID NO: 2070 - DNA, 20 bp, Arachis hypogaea
  source 1..20: mol_type = other DNA
aaccatttagagtagaggga

SEQ ID NO: 2071 - DNA, 20 bp, Arachis hypogaea
  source 1..20: mol_type = other DNA
caaaaaccatttagagtaga

SEQ ID NO: 2072 - DNA, 20 bp, Arachis hypogaea
  source 1..20: mol_type = other DNA
ccaaaaaccatttagagtag

SEQ ID NO: 2073 - DNA, 20 bp, Arachis hypogaea
  source 1..20: mol_type = other DNA
tcccttccctctactctaaa

SEQ ID NO: 2074 - DNA, 20 bp, Arachis hypogaea
  source 1..20: mol_type = other DNA
cctctactctaaatggtttt

SEQ ID NO: 2075 - DNA, 20 bp, Arachis hypogaea
  source 1..20: mol_type = other DNA
ttaaaagtaccaatggatgg

SEQ ID NO: 2076 - DNA, 20 bp, Arachis hypogaea
  source 1..20: mol_type = other DNA
cttaaaagtaccaatggatg

SEQ ID NO: 2077 - DNA, 20 bp, Arachis hypogaea
  source 1..20: mol_type = other DNA
ttttggaatcccccatccat

SEQ ID NO: 2078 - DNA, 20 bp, Arachis hypogaea
  source 1..20: mol_type = other DNA
tcttaaaagtaccaatggat

SEQ ID NO: 2079 - DNA, 20 bp, Arachis hypogaea
  source 1..20: mol_type = other DNA
atcttaaaagtaccaatgga

SEQ ID NO: 2080 - DNA, 20 bp, Arachis hypogaea
  source 1..20: mol_type = other DNA
attaatcttaaaagtaccaa

SEQ ID NO: 2081 - DNA, 20 bp, Arachis hypogaea
  source 1..20: mol_type = other DNA
aattgtgatgctagttattt

SEQ ID NO: 2082 - DNA, 20 bp, Arachis hypogaea
  source 1..20: mol_type = other DNA
tgatgctagttattttggtt

SEQ ID NO: 2083 - DNA, 20 bp, Arachis hypogaea
  source 1..20: mol_type = other DNA
gatgctagttattttggttc

SEQ ID NO: 2084 - DNA, 20 bp, Arachis hypogaea
  source 1..20: mol_type = other DNA
tttggttcgggtgatagtgt

SEQ ID NO: 2085 - DNA, 20 bp, Arachis hypogaea
  source 1..20: mol_type = other DNA
tgtgttattagagattgtaa

SEQ ID NO: 2086 - DNA, 20 bp, Arachis hypogaea
  source 1..20: mol_type = other DNA
gtgttattagagattgtaat

SEQ ID NO: 2087 - DNA, 20 bp, Arachis hypogaea
  source 1..20: mol_type = other DNA
ttagagattgtaatgggagc

SEQ ID NO: 2088 - DNA, 20 bp, Arachis hypogaea
  source 1..20: mol_type = other DNA
attgtaatgggagctggcaa

SEQ ID NO: 2089 - DNA, 20 bp, Arachis hypogaea
  source 1..20: mol_type = other DNA
ttgtaatgggagctggcaaa

SEQ ID NO: 2090 - DNA, 20 bp, Arachis hypogaea
  source 1..20: mol_type = other DNA
tgtaatgggagctggcaaag

SEQ ID NO: 2091 - DNA, 20 bp, Arachis hypogaea
  source 1..20: mol_type = other DNA
gtaatgggagctggcaaagg

SEQ ID NO: 2092 - DNA, 20 bp, Arachis hypogaea
  source 1..20: mol_type = other DNA
gagctggcaaagggggtgtt

SEQ ID NO: 2093 - DNA, 20 bp, Arachis hypogaea
  source 1..20: mol_type = other DNA
agctggcaaagggggtgttt

SEQ ID NO: 2094 - DNA, 20 bp, Arachis hypogaea
  source 1..20: mol_type = other DNA
gagagtaataatattcttca

SEQ ID NO: 2095 - DNA, 20 bp, Arachis hypogaea
  source 1..20: mol_type = other DNA
aaggagaattgtttgctatt

SEQ ID NO: 2096 - DNA, 20 bp, Arachis hypogaea
  source 1..20: mol_type = other DNA
gaattgtttgctatttggag

SEQ ID NO: 2097 - DNA, 20 bp, Arachis hypogaea
  source 1..20: mol_type = other DNA
ggagaggatatctcttagct

SEQ ID NO: 2098 - DNA, 20 bp, Arachis hypogaea
  source 1..20: mol_type = other DNA
gagaggatatctcttagctt

SEQ ID NO: 2099 - DNA, 20 bp, Arachis hypogaea
  source 1..20: mol_type = other DNA
atatctcttagcttgggatg

SEQ ID NO: 2100 - DNA, 20 bp, Arachis hypogaea
  source 1..20: mol_type = other DNA
tatctcttagcttgggatgt

SEQ ID NO: 2101 - DNA, 20 bp, Arachis hypogaea
  source 1..20: mol_type = other DNA
acgagatgttatttgtgaga

SEQ ID NO: 2102 - DNA, 20 bp, Arachis hypogaea
  source 1..20: mol_type = other DNA
tatttgtgagacggattgtg

SEQ ID NO: 2103 - DNA, 20 bp, Arachis hypogaea
  source 1..20: mol_type = other DNA
tttaatcttgttactcaaga

SEQ ID NO: 2104 - DNA, 20 bp, Arachis hypogaea
  source 1..20: mol_type = other DNA
cttgttactcaagatggttt

SEQ ID NO: 2105 - DNA, 20 bp, Arachis hypogaea
  source 1..20: mol_type = other DNA
ttgttactcaagatggtttt

SEQ ID NO: 2106 - DNA, 20 bp, Arachis hypogaea
  source 1..20: mol_type = other DNA
ttttgggtttattgatccac

SEQ ID NO: 2107 - DNA, 20 bp, Arachis hypogaea
  source 1..20: mol_type = other DNA
tctcttattttgagcaccag

SEQ ID NO: 2108 - DNA, 20 bp, Arachis hypogaea
  source 1..20: mol_type = other DNA
aaataagagatatcatgcat

SEQ ID NO: 2109 - DNA, 20 bp, Arachis hypogaea
  source 1..20: mol_type = other DNA
gagatatcatgcattggaat

SEQ ID NO: 2110 - DNA, 20 bp, Arachis hypogaea
  source 1..20: mol_type = other DNA
atatcatgcattggaattgg

SEQ ID NO: 2111 - DNA, 20 bp, Arachis hypogaea
  source 1..20: mol_type = other DNA
tatcatgcattggaattggc

SEQ ID NO: 2112 - DNA, 20 bp, Arachis hypogaea
  source 1..20: mol_type = other DNA
gattatgagagatgcaaaca

SEQ ID NO: 2113 - DNA, 20 bp, Arachis hypogaea
  source 1..20: mol_type = other DNA
tatgagagatgcaaacacgg

SEQ ID NO: 2114 - DNA, 20 bp, Arachis hypogaea
  source 1..20: mol_type = other DNA
aaacacggtggcagatacta

SEQ ID NO: 2115 - DNA, 20 bp, Arachis hypogaea
  source 1..20: mol_type = other DNA
ggcagatactatggcaaaga

SEQ ID NO: 2116 - DNA, 20 bp, Arachis hypogaea
  source 1..20: mol_type = other DNA
gaagttaaaactttcgcatg

SEQ ID NO: 2117 - DNA, 20 bp, Arachis hypogaea
  source 1..20: mol_type = other DNA
atgtggagtttctttcacct

SEQ ID NO: 2118 - DNA, 20 bp, Arachis hypogaea
  source 1..20: mol_type = other DNA
tgtggagtttctttcacctt

SEQ ID NO: 2119 - DNA, 20 bp, Arachis hypogaea
  source 1..20: mol_type = other DNA
ggagtttctttcaccttggg

SEQ ID NO: 2120 - DNA, 20 bp, Arachis hypogaea
  source 1..20: mol_type = other DNA
ctactcttaaactcctccca

SEQ ID NO: 2121 - DNA, 20 bp, Arachis hypogaea
  source 1..20: mol_type = other DNA
agtttaagagtagtcttaaa

SEQ ID NO: 2122 - DNA, 20 bp, Arachis hypogaea
  source 1..20: mol_type = other DNA
gtttaagagtagtcttaaac

SEQ ID NO: 2123 - DNA, 20 bp, Arachis hypogaea
  source 1..20: mol_type = other DNA
caaggaactgtctaaataga

SEQ ID NO: 2124 - DNA, 20 bp, Arachis hypogaea
  source 1..20: mol_type = other DNA
aaaacaaaacaaacaaaaca

SEQ ID NO: 2125 - DNA, 20 bp, Arachis hypogaea
  source 1..20: mol_type = other DNA
caactcgaattaattttttt

SEQ ID NO: 2126 - DNA, 20 bp, Arachis hypogaea
  source 1..20: mol_type = other DNA
caaaaaaaattaattcgagt

SEQ ID NO: 2127 - DNA, 20 bp, Arachis hypogaea
  source 1..20: mol_type = other DNA
aaacattacatgcacaagtt

SEQ ID NO: 2128 - DNA, 20 bp, Arachis hypogaea
  source 1..20: mol_type = other DNA
gaaacattacatgcacaagt

SEQ ID NO: 2129 - DNA, 20 bp, Arachis hypogaea
  source 1..20: mol_type = other DNA
aatcattgattaatttgttg

SEQ ID NO: 2130 - DNA, 20 bp, Arachis hypogaea
  source 1..20: mol_type = other DNA
ttaaataagataattttgaa

SEQ ID NO: 2131 - DNA, 20 bp, Arachis hypogaea
  source 1..20: mol_type = other DNA
aataggagaaatcaataatg

SEQ ID NO: 2132 - DNA, 20 bp, Arachis hypogaea
  source 1..20: mol_type = other DNA
gaataggagaaatcaataat

SEQ ID NO: 2133 - DNA, 20 bp, Arachis hypogaea
  source 1..20: mol_type = other DNA
agaataggagaaatcaataa

SEQ ID NO: 2134 - DNA, 20 bp, Arachis hypogaea
  source 1..20: mol_type = other DNA
ggttaattagtgaaaagaat

SEQ ID NO: 2135 - DNA, 20 bp, Arachis hypogaea
  source 1..20: mol_type = other DNA
atgagattatgagagtgctg

SEQ ID NO: 2136 - DNA, 20 bp, Arachis hypogaea
  source 1..20: mol_type = other DNA
ttctctttatatagaagtgg

SEQ ID NO: 2137 - DNA, 20 bp, Arachis hypogaea
  source 1..20: mol_type = other DNA
gttctctttatatagaagtg

SEQ ID NO: 2138 - DNA, 20 bp, Arachis hypogaea
  source 1..20: mol_type = other DNA
tgttctctttatatagaagt

SEQ ID NO: 2139 - DNA, 20 bp, Arachis hypogaea
  source 1..20: mol_type = other DNA
gtgttctctttatatagaag

SEQ ID NO: 2140 - DNA, 20 bp, Arachis hypogaea
  source 1..20: mol_type = other DNA
tggtgacctgaagtggtgca

SEQ ID NO: 2141 - DNA, 20 bp, Arachis hypogaea
  source 1..20: mol_type = other DNA
agaacaccttgcaccacttc

SEQ ID NO: 2142 - DNA, 20 bp, Arachis hypogaea
  source 1..20: mol_type = other DNA
ttgaatttggtgacctgaag

SEQ ID NO: 2143 - DNA, 20 bp, Arachis hypogaea
  source 1..20: mol_type = other DNA
gagtgttgaaagcttgaatt

SEQ ID NO: 2144 - DNA, 20 bp, Arachis hypogaea
  source 1..20: mol_type = other DNA
aataaaagctaagtgtgttt

SEQ ID NO: 2145 - DNA, 20 bp, Arachis hypogaea
  source 1..20: mol_type = other DNA
cttgttcatattataattaa

SEQ ID NO: 2146 - DNA, 20 bp, Arachis hypogaea
  source 1..20: mol_type = other DNA
gcatcacaaatgcaaacttg

SEQ ID NO: 2147 - DNA, 20 bp, Arachis hypogaea
  source 1..20: mol_type = other DNA
atttgtgatgcttgtgtgca

SEQ ID NO: 2148 - DNA, 20 bp, Arachis hypogaea
  source 1..20: mol_type = other DNA
gatgcttgtgtgcatggcca

SEQ ID NO: 2149 - DNA, 20 bp, Arachis hypogaea
  source 1..20: mol_type = other DNA
gcttgtgtgcatggccatgg

SEQ ID NO: 2150 - DNA, 20 bp, Arachis hypogaea
  source 1..20: mol_type = other DNA
cttgtgtgcatggccatggt

SEQ ID NO: 2151 - DNA, 20 bp, Arachis hypogaea
  source 1..20: mol_type = other DNA
caccattggtgctcccacca

SEQ ID NO: 2152 - DNA, 20 bp, Arachis hypogaea
  source 1..20: mol_type = other DNA
ggccatggtgggagcaccaa

SEQ ID NO: 2153 - DNA, 20 bp, Arachis hypogaea
  source 1..20: mol_type = other DNA
catgatatggcattcaccat

SEQ ID NO: 2154 - DNA, 20 bp, Arachis hypogaea
  source 1..20: mol_type = other DNA
gttcacttggccacatgata

SEQ ID NO: 2155 - DNA, 20 bp, Arachis hypogaea
  source 1..20: mol_type = other DNA
atggtgaatgccatatcatg

SEQ ID NO: 2156 - DNA, 20 bp, Arachis hypogaea
  source 1..20: mol_type = other DNA
gtgctagggcactgttcact

SEQ ID NO: 2157 - DNA, 20 bp, Arachis hypogaea
  source 1..20: mol_type = other DNA
gaaagggatgcatggtgcta

SEQ ID NO: 2158 - DNA, 20 bp, Arachis hypogaea
  source 1..20: mol_type = other DNA
ggaaagggatgcatggtgct

SEQ ID NO: 2159 - DNA, 20 bp, Arachis hypogaea
  source 1..20: mol_type = other DNA
tttgtgaggaaagggatgca

SEQ ID NO: 2160 - DNA, 20 bp, Arachis hypogaea
  source 1..20: mol_type = other DNA
ctccaccctttgtgaggaaa

SEQ ID NO: 2161 - DNA, 20 bp, Arachis hypogaea
  source 1..20: mol_type = other DNA
gctccaccctttgtgaggaa

SEQ ID NO: 2162 - DNA, 20 bp, Arachis hypogaea
  source 1..20: mol_type = other DNA
atgcatccctttcctcacaa

SEQ ID NO: 2163 - DNA, 20 bp, Arachis hypogaea
  source 1..20: mol_type = other DNA
tgcatccctttcctcacaaa

SEQ ID NO: 2164 - DNA, 20 bp, Arachis hypogaea
  source 1..20: mol_type = other DNA
gaggagctccaccctttgtg

SEQ ID NO: 2165 - DNA, 20 bp, Arachis hypogaea
  source 1..20: mol_type = other DNA
atccctttcctcacaaaggg

SEQ ID NO: 2166 - DNA, 20 bp, Arachis hypogaea
  source 1..20: mol_type = other DNA
aaagggtggagctcctcctc

SEQ ID NO: 2167 - DNA, 20 bp, Arachis hypogaea
  source 1..20: mol_type = other DNA
ccgctgcaacaagccggagg

SEQ ID NO: 2168 - DNA, 20 bp, Arachis hypogaea
  source 1..20: mol_type = other DNA
actccgctgcaacaagccgg

SEQ ID NO: 2169 - DNA, 20 bp, Arachis hypogaea
  source 1..20: mol_type = other DNA
ctaactccgctgcaacaagc

SEQ ID NO: 2170 - DNA, 20 bp, Arachis hypogaea
  source 1..20: mol_type = other DNA
cctcctccggcttgttgcag

SEQ ID NO: 2171 - DNA, 20 bp, Arachis hypogaea
  source 1..20: mol_type = other DNA
gcttgttgcagcggagttag

SEQ ID NO: 2172 - DNA, 20 bp, Arachis hypogaea
  source 1..20: mol_type = other DNA
agcggagttagaggccttct

SEQ ID NO: 2173 - DNA, 20 bp, Arachis hypogaea
  source 1..20: mol_type = other DNA
tggttcttaaagcaccgaga

SEQ ID NO: 2174 - DNA, 20 bp, Arachis hypogaea
  source 1..20: mol_type = other DNA
ggcggcctggcggtctgcgg

SEQ ID NO: 2175 - DNA, 20 bp, Arachis hypogaea
  source 1..20: mol_type = other DNA
acaggcggcctggcggtctg

SEQ ID NO: 2176 - DNA, 20 bp, Arachis hypogaea
  source 1..20: mol_type = other DNA
aagaaccaccgcagaccgcc

SEQ ID NO: 2177 - DNA, 20 bp, Arachis hypogaea
  source 1..20: mol_type = other DNA
ggcagttacaggcggcctgg

SEQ ID NO: 2178 - DNA, 20 bp, Arachis hypogaea
  source 1..20: mol_type = other DNA
tgaggcagttacaggcggcc

SEQ ID NO: 2179 - DNA, 20 bp, Arachis hypogaea
  source 1..20: mol_type = other DNA
ggctttgaggcagttacagg

SEQ ID NO: 2180 - DNA, 20 bp, Arachis hypogaea
  source 1..20: mol_type = other DNA
agcggctttgaggcagttac

SEQ ID NO: 2181 - DNA, 20 bp, Arachis hypogaea
  source 1..20: mol_type = other DNA
gggaaccggcagcggctttg

SEQ ID NO: 2182 - DNA, 20 bp, Arachis hypogaea
  source 1..20: mol_type = other DNA
aactgcctcaaagccgctgc

SEQ ID NO: 2183 - DNA, 20 bp, Arachis hypogaea
  source 1..20: mol_type = other DNA
gccacgaagggaaccggcag

SEQ ID NO: 2184 - DNA, 20 bp, Arachis hypogaea
  source 1..20: mol_type = other DNA
gttgaggccacgaagggaac

SEQ ID NO: 2185 - DNA, 20 bp, Arachis hypogaea
  source 1..20: mol_type = other DNA
gccgctgccggttcccttcg

SEQ ID NO: 2186 - DNA, 20 bp, Arachis hypogaea
  source 1..20: mol_type = other DNA
gccttggttgaggccacgaa

SEQ ID NO: 2187 - DNA, 20 bp, Arachis hypogaea
  source 1..20: mol_type = other DNA
tgccttggttgaggccacga

SEQ ID NO: 2188 - DNA, 20 bp, Arachis hypogaea
  source 1..20: mol_type = other DNA
tcccttcgtggcctcaacca

SEQ ID NO: 2189 - DNA, 20 bp, Arachis hypogaea
  source 1..20: mol_type = other DNA
cggcggcgttgccttggttg

SEQ ID NO: 2190 - DNA, 20 bp, Arachis hypogaea
  source 1..20: mol_type = other DNA
ggagggcggcggcgttgcct

SEQ ID NO: 2191 - DNA, 20 bp, Arachis hypogaea
  source 1..20: mol_type = other DNA
gcatcttccagggagggcgg

SEQ ID NO: 2192 - DNA, 20 bp, Arachis hypogaea
  source 1..20: mol_type = other DNA
accgcatcttccagggaggg

SEQ ID NO: 2193 - DNA, 20 bp, Arachis hypogaea
  source 1..20: mol_type = other DNA
ggcaacgccgccgccctccc

SEQ ID NO: 2194 - DNA, 20 bp, Arachis hypogaea
  source 1..20: mol_type = other DNA
gacaccgcatcttccaggga

SEQ ID NO: 2195 - DNA, 20 bp, Arachis hypogaea
  source 1..20: mol_type = other DNA
tgacaccgcatcttccaggg

SEQ ID NO: 2196 - DNA, 20 bp, Arachis hypogaea
  source 1..20: mol_type = other DNA
tgctgacaccgcatcttcca

SEQ ID NO: 2197 - DNA, 20 bp, Arachis hypogaea
  source 1..20: mol_type = other DNA
atgctgacaccgcatcttcc

SEQ ID NO: 2198 - DNA, 20 bp, Arachis hypogaea
  source 1..20: mol_type = other DNA
gccgccctccctggaagatg

SEQ ID NO: 2199 - DNA, 20 bp, Arachis hypogaea
  source 1..20: mol_type = other DNA
gtggaggtgctgatcttgta

SEQ ID NO: 2200 - DNA, 20 bp, Arachis hypogaea
  source 1..20: mol_type = other DNA
atacgtagcacagttggtgg

SEQ ID NO: 2201 - DNA, 20 bp, Arachis hypogaea
  source 1..20: mol_type = other DNA
aacatacgtagcacagttgg

SEQ ID NO: 2202 - DNA, 20 bp, Arachis hypogaea
  source 1..20: mol_type = other DNA
agaaacatacgtagcacagt

SEQ ID NO: 2203 - DNA, 20 bp, Arachis hypogaea
  source 1..20: mol_type = other DNA
aattaagaaataaataaaaa

SEQ ID NO: 2204 - DNA, 20 bp, Arachis hypogaea
  source 1..20: mol_type = other DNA
tttatttatttcttaatttt

SEQ ID NO: 2205 - DNA, 20 bp, Arachis hypogaea
  source 1..20: mol_type = other DNA
atagtaatactaattattga

SEQ ID NO: 2206 - DNA, 20 bp, Arachis hypogaea
  source 1..20: mol_type = other DNA
aaattactaaaagttgctga

SEQ ID NO: 2207 - DNA, 20 bp, Arachis hypogaea
  source 1..20: mol_type = other DNA
aattttacttagcatttaat

SEQ ID NO: 2208 - DNA, 3997 bp, Arachis hypogaea
  source 1..3997: mol_type = genomic DNA
ctatttaattatcaataaaaatatttcttaatgcagaaacattcaaatgaacaaactaacaattgcaagtaggacaaataaattattataacctaaaacagaagtttatttagttagtagagtattttaaaagcatttgaaagtaaatttttgggaaaattttagtagagtatttatcaatggttttgttgcttcagatgaaatccgttcaagcatcatttgccttgtccaatgggtcacccacggtgcagggggagcatcaggtgaaaacgggcaggggaacttgatttcgtggaaatatatcaacattaatacaaaagcacagccatcaacaggctgtttcttccccctttcttttgttttcaactcctttcatcaagaagttgagcacatgctttgcccaatcccattctcgaatgttgtccacatgaaagattggtggcttatggattggggaggccacacttaccgttgtggggagcaagaagcacttttgtatgaagacaacaaaagttctcttgaaatttttctggttctcctccccttctacactcatatcaagcacattccttgtctgctggatttagattgttgtaatcaaccttttcaggaaaacgattttctacaatattttaatagtaaaaatcagtaaaaaaatggtcagttaattttctgcacactaatgaactgaaaataagcagtaaatagaaaatgtattacctccgttggttatgccgagggcagctgctactttccgaggagttatgtatatttttccctggagagttttcaggcatcctttctctttatcaaaccgatcaagcaattctttcaacagtgtattagagacattcatttttggaacatttgccagagcaccaaatcctatttcttccacaatatctttcttttcttgactcatttgcatgtacactgttgatattgcctttgtttggcatctgcaatagtgtgttttctgcacattttgaaatagaatgtgaggatatatttataatacaaaatagatatttttcgaatgaaagcggataaatatatttaatctccttacgttataatgtgctttcttcttcattgttgccattttcttgttgtattttttgctgtaatgaaaaattttggtcaatacttcattgaatacatcaacaagcacaagcatgtatatcttaatcaagtcaattaaaatgccacaactcaccgaagtgaaaattgttcatgcacagaaccaaaatcacaaagggtaccgaaccgaaaaacgttcatgtggttaataaatgattatcaactttcaatcaacaagaatagtattcttccatgcaaaagaagtactgaagatagtaacaatcattttcaaagttgtagttaaactatccacacaaataagaacaagcacatatatcttaatcaaatcaacatcttccaaaagaaaagtttttcaaatttcatcaattaggtgttctttgaaaatgacattcgcagattggattctttaaaaactcttactgaaacttgatatctttctttaagtatcaaggtcaactaccattcgtcctgaaatctatccaatataatgagacaattttacagtagtatggcttatcaaagtgaaagagttgtctctaatttcaattgtcctaaacaaaacttattcaattcatcaacaatcacaagcatgcatatcttaatcaagttaattaaaatgccacaacctaccgaaccaaaactcattcatgcgtagaaccaaaatcacaaaagccaccgaactgaaaaacgttcatgtggttaataaatgatgatcaattttcaatcaacaagaatagtattcttgcatgcaaaagaagtactgaagatagtaacaaagctctagttaaatatccacaccaataagaacaagcacgtatatcttaaagccctagttacactaaattgaatgaaaataacaacaaatttcattccaaggcctagttatattgtacaaatcattcacaatagttcaatctactaaacgaaccaaagcaaaccagtaaaactaaaatgcaactaagcgaaatgctacattgcaagatttcagatgaatagtaattttttcatacctttggtagtctttgttgctgttttcgtttgtttctggttgttgcttgcgaaatcttcttctgattcctttctagtagtggtttctgcagagaatgtgattgaagtttgagtgattttgagagagattcgaaaagacggaacgttttcgtgtgtattgaagaagaaagaacgttttttcataatgaagcgcgaatgaagtagtcatttcatttgtatggggcgcatgaaagtcacgtttatttattgagattgggaagcgcattagttgttttgggtttggaccaacttgattacatagatgtatagcaagcccgtttttattattattatagactaaaatgaaatagtttaatatattaaatgagtagaatttgagtttcagtaagttgaacttatagattcctaattaatctctctcaattatgattatttatattaatacataaattgtatattttatacttttaattgataataataacatataaccttacatacacagataattataacatttaagtttgataaatatacaaagtatattattttttattgtatatttataaataataaattaaaatgtgataagtttgaattaattaaattatttacaaaagaagagaacaactatacttatattagttgtattggcgtaaacctcgagaaaatggcacaccaaagcgaagcctgatctcaagtatgtagccatgcactcatgtgaatgaatcactactttgtaagtttgtagttttgtactcttttgcaattgactgaggccactcacactgaaacctgttaaccatgcaaagcccttactcaacaactcgcacctacgtgtcacccaccttgcaacccaacttttctataagaaacacatactctcacacactccacgtcacatgcatacacaaaccaaattaaatatcattccttctctttacctcttctccctgaaacctgcttcattcagagtaaaagaaacataaggaagaaaagggagcttcctgcaaccatcagccatgactgaccgtacccaaccacacactgtccaagtccacaccacagctggccgtttcggcgacaccgctgccggaactaaccgctatgccgacagaggcccgtcaacatctaaggttatcgccgtcatcactggactccctatcggcggcacgttgctattgttcgcggggcttgcccttgccggaaccctgcttgggctggcggtgaccaccccgcttttcatcctcttcagccctgtcatagttccagccaccattgtcgttgggctctcggtggcggggttcttgacgtcaggtgcatgtgggctgacggggctgtcttcgttctcgtgggtcatgaattacatccggcagacccacggatcggtgccggagcagctggaaatggcaaagcaccgcatggctgacgtggccggttacgttggacagaagacgaaggatgtaggacagaagaccaaggaagttgggcaagagatacagaccaaggctcaggattcaaagagaacttgatagaatagtggtttaagcttaaggatgaaaggggtctaatgggttttgatggtgacacgcaaataaatgatgtactccttgtagttgaagttgtgagcattttgtgtctttctatgatcttgtaggtagcggtttggtttgtttatgttcttgttgatttgcttttttaatgagagaagtgatttttctttttttggtcagagaagtggtttgttcgtcataaagaggtgctgctaccagctttgtttgtgtgtcagtatgcatgtaggtttggttcacttcaattgtttaatttcaatgcgagtgttttctgtcaagtgcaataatgaagaagtgttcatgtttcatactttcaa

SEQ ID NO: 2209 - protein, 169 aa, Arachis hypogaea
MTDRTQPHTVQVHTTAGRFGDTAAGTNRYADRGPSTSKVIAVITGLPIGGTLLLFAGLALAGTLLGLAVTTPLFILFSPVIVPATIVVGLSVAGFLTSGACGLTGLSSFSWVMNYIRQTHGSVPEQLEMAKHRMADVAGYVGQKTKDVGQKTKEVGQEIQTKAQDSKRT

SEQ ID NO: 2210 - DNA, 20 bp, Arachis hypogaea
  source 1..20: mol_type = other DNA
acaaactaacaattgcaagt

SEQ ID NO: 2211 - DNA, 20 bp, Arachis hypogaea
  source 1..20: mol_type = other DNA
actaaataaacttctgtttt

SEQ ID NO: 2212 - DNA, 20 bp, Arachis hypogaea
  source 1..20: mol_type = other DNA
agcatttgaaagtaaatttt

SEQ ID NO: 2213 - DNA, 20 bp, Arachis hypogaea
  source 1..20: mol_type = other DNA
gcatttgaaagtaaattttt

SEQ ID NO: 2214 - DNA, 20 bp, Arachis hypogaea
  source 1..20: mol_type = other DNA
tttagtagagtatttatcaa

SEQ ID NO: 2215 - DNA, 20 bp, Arachis hypogaea
  source 1..20: mol_type = other DNA
caaggcaaatgatgcttgaa

SEQ ID NO: 2216 - DNA, 20 bp, Arachis hypogaea
  source 1..20: mol_type = other DNA
cgtgggtgacccattggaca

SEQ ID NO: 2217 - DNA, 20 bp, Arachis hypogaea
  source 1..20: mol_type = other DNA
gcatcatttgccttgtccaa

SEQ ID NO: 2218 - DNA, 20 bp, Arachis hypogaea
  source 1..20: mol_type = other DNA
catcatttgccttgtccaat

SEQ ID NO: 2219 - DNA, 20 bp, Arachis hypogaea
  source 1..20: mol_type = other DNA
ctgcaccgtgggtgacccat

SEQ ID NO: 2220 - DNA, 20 bp, Arachis hypogaea
  source 1..20: mol_type = other DNA
cttgtccaatgggtcaccca

SEQ ID NO: 2221 - DNA, 20 bp, Arachis hypogaea
  source 1..20: mol_type = other DNA
tgatgctccccctgcaccgt

SEQ ID NO: 2222 - DNA, 20 bp, Arachis hypogaea
  source 1..20: mol_type = other DNA
caatgggtcacccacggtgc

SEQ ID NO: 2223 - DNA, 20 bp, Arachis hypogaea
  source 1..20: mol_type = other DNA
ctgatgctccccctgcaccg

SEQ ID NO: 2224 - DNA, 20 bp, Arachis hypogaea
  source 1..20: mol_type = other DNA
aatgggtcacccacggtgca

SEQ ID NO: 2225 - DNA, 20 bp, Arachis hypogaea
  source 1..20: mol_type = other DNA
atgggtcacccacggtgcag

SEQ ID NO: 2226 - DNA, 20 bp, Arachis hypogaea
  source 1..20: mol_type = other DNA
tgggtcacccacggtgcagg

SEQ ID NO: 2227 - DNA, 20 bp, Arachis hypogaea
  source 1..20: mol_type = other DNA
cacggtgcagggggagcatc

SEQ ID NO: 2228 - DNA, 20 bp, Arachis hypogaea
  source 1..20: mol_type = other DNA
gggggagcatcaggtgaaaa

SEQ ID NO: 2229 - DNA, 20 bp, Arachis hypogaea
  source 1..20: mol_type = other DNA
ggggagcatcaggtgaaaac

SEQ ID NO: 2230 - DNA, 20 bp, Arachis hypogaea
  source 1..20: mol_type = other DNA
agcatcaggtgaaaacgggc

SEQ ID NO: 2231 - DNA, 20 bp, Arachis hypogaea
  source 1..20: mol_type = other DNA
gcatcaggtgaaaacgggca

SEQ ID NO: 2232 - DNA, 20 bp, Arachis hypogaea
  source 1..20: mol_type = other DNA
catcaggtgaaaacgggcag

SEQ ID NO: 2233 - DNA, 20 bp, Arachis hypogaea
  source 1..20: mol_type = other DNA
ggcaggggaacttgatttcg

SEQ ID NO: 2234 - DNA, 20 bp, Arachis hypogaea
  source 1..20: mol_type = other DNA
acaaaagcacagccatcaac

SEQ ID NO: 2235 - DNA, 20 bp, Arachis hypogaea
  source 1..20: mol_type = other DNA
gggaagaaacagcctgttga

SEQ ID NO: 2236 - DNA, 20 bp, Arachis hypogaea
  source 1..20: mol_type = other DNA
agttgaaaacaaaagaaagg

SEQ ID NO: 2237 - DNA, 20 bp, Arachis hypogaea
  source 1..20: mol_type = other DNA
gagttgaaaacaaaagaaag

SEQ ID NO: 2238 - DNA, 20 bp, Arachis hypogaea
  source 1..20: mol_type = other DNA
ggagttgaaaacaaaagaaa

SEQ ID NO: 2239 - DNA, 20 bp, Arachis hypogaea
  source 1..20: mol_type = other DNA
aggagttgaaaacaaaagaa

SEQ ID NO: 2240 - DNA, 20 bp, Arachis hypogaea
  source 1..20: mol_type = other DNA
gtgctcaacttcttgatgaa

SEQ ID NO: 2241 - DNA, 20 bp, Arachis hypogaea
  source 1..20: mol_type = other DNA
caacattcgagaatgggatt

SEQ ID NO: 2242 - DNA, 20 bp, Arachis hypogaea
  source 1..20: mol_type = other DNA
acaacattcgagaatgggat

SEQ ID NO: 2243 - DNA, 20 bp, Arachis hypogaea
  source 1..20: mol_type = other DNA
tgtggacaacattcgagaat

SEQ ID NO: 2244 - DNA, 20 bp, Arachis hypogaea
  source 1..20: mol_type = other DNA
atgtggacaacattcgagaa

SEQ ID NO: 2245 - DNA, 20 bp, Arachis hypogaea
  source 1..20: mol_type = other DNA
taagccaccaatctttcatg

SEQ ID NO: 2246 - DNA, 20 bp, Arachis hypogaea
  source 1..20: mol_type = other DNA
atgttgtccacatgaaagat

SEQ ID NO: 2247 - DNA, 20 bp, Arachis hypogaea
  source 1..20: mol_type = other DNA
ttgtccacatgaaagattgg

SEQ ID NO: 2248 - DNA, 20 bp, Arachis hypogaea
  source 1..20: mol_type = other DNA
catgaaagattggtggctta

SEQ ID NO: 2249 - DNA, 20 bp, Arachis hypogaea
  source 1..20: mol_type = other DNA
aagattggtggcttatggat

SEQ ID NO: 2250 - DNA, 20 bp, Arachis hypogaea
  source 1..20: mol_type = other DNA
agattggtggcttatggatt

SEQ ID NO: 2251 - DNA, 20 bp, Arachis hypogaea
  source 1..20: mol_type = other DNA
gattggtggcttatggattg

SEQ ID NO: 2252 - DNA, 20 bp, Arachis hypogaea
  source 1..20: mol_type = other DNA
tggtggcttatggattgggg

SEQ ID NO: 2253 - DNA, 20 bp, Arachis hypogaea
  source 1..20: mol_type = other DNA
gctccccacaacggtaagtg

SEQ ID NO: 2254 - DNA, 20 bp, Arachis hypogaea
  source 1..20: mol_type = other DNA
ggaggccacacttaccgttg

SEQ ID NO: 2255 - DNA, 20 bp, Arachis hypogaea
  source 1..20: mol_type = other DNA
gaggccacacttaccgttgt

SEQ ID NO: 2256 - DNA, 20 bp, Arachis hypogaea
  source 1..20: mol_type = other DNA
aggccacacttaccgttgtg

SEQ ID NO: 2257 - DNA, 20 bp, Arachis hypogaea
  source 1..20: mol_type = other DNA
gtgcttcttgctccccacaa

SEQ ID NO: 2258 - DNA, 20 bp, Arachis hypogaea
  source 1..20: mol_type = other DNA
aagttctcttgaaatttttc

SEQ ID NO: 2259 - DNA, 20 bp, Arachis hypogaea
  source 1..20: mol_type = other DNA
tgatatgagtgtagaagggg

SEQ ID NO: 2260 - DNA, 20 bp, Arachis hypogaea
  source 1..20: mol_type = other DNA
gcttgatatgagtgtagaag

SEQ ID NO: 2261 - DNA, 20 bp, Arachis hypogaea
  source 1..20: mol_type = other DNA
tgcttgatatgagtgtagaa

SEQ ID NO: 2262 - DNA, 20 bp, Arachis hypogaea
  source 1..20: mol_type = other DNA
gtgcttgatatgagtgtaga

SEQ ID NO: 2263 - DNA, 20 bp, Arachis hypogaea
  source 1..20: mol_type = other DNA
caatctaaatccagcagaca

SEQ ID NO: 2264 - DNA, 20 bp, Arachis hypogaea
  source 1..20: mol_type = other DNA
caagcacattccttgtctgc

SEQ ID NO: 2265 - DNA, 20 bp, Arachis hypogaea
  source 1..20: mol_type = other DNA
ttgttgtaatcaaccttttc

SEQ ID NO: 2266 - DNA, 20 bp, Arachis hypogaea
  source 1..20: mol_type = other DNA
agaaaatcgttttcctgaaa

SEQ ID NO: 2267 - DNA, 20 bp, Arachis hypogaea
  source 1..20: mol_type = other DNA
agtaaaaatcagtaaaaaaa

SEQ ID NO: 2268 - DNA, 20 bp, Arachis hypogaea
  source 1..20: mol_type = other DNA
agaaaatgtattacctccgt

SEQ ID NO: 2269 - DNA, 20 bp, Arachis hypogaea
  source 1..20: mol_type = other DNA
gccctcggcataaccaacgg

SEQ ID NO: 2270 - DNA, 20 bp, Arachis hypogaea
  source 1..20: mol_type = other DNA
gctgccctcggcataaccaa

SEQ ID NO: 2271 - DNA, 20 bp, Arachis hypogaea
  source 1..20: mol_type = other DNA
tacctccgttggttatgccg

SEQ ID NO: 2272 - DNA, 20 bp, Arachis hypogaea
  source 1..20: mol_type = other DNA
acctccgttggttatgccga

SEQ ID NO: 2273 - DNA, 20 bp, Arachis hypogaea
  source 1..20: mol_type = other DNA
cggaaagtagcagctgccct

SEQ ID NO: 2274 - DNA, 20 bp, Arachis hypogaea
  source 1..20: mol_type = other DNA
agggcagctgctactttccg

SEQ ID NO: 2275 - DNA, 20 bp, Arachis hypogaea
  source 1..20: mol_type = other DNA
gaaaaatatacataactcct

SEQ ID NO: 2276 - DNA, 20 bp, Arachis hypogaea
  source 1..20: mol_type = other DNA
gagttatgtatatttttccc

SEQ ID NO: 2277 - DNA, 20 bp, Arachis hypogaea
  source 1..20: mol_type = other DNA
ggatgcctgaaaactctcca

SEQ ID NO: 2278 - DNA, 20 bp, Arachis hypogaea
  source 1..20: mol_type = other DNA
aggatgcctgaaaactctcc

SEQ ID NO: 2279 - DNA, 20 bp, Arachis hypogaea
  source 1..20: mol_type = other DNA
tttttccctggagagttttc

SEQ ID NO: 2280 - DNA, 20 bp, Arachis hypogaea
  source 1..20: mol_type = other DNA
gatcggtttgataaagagaa

SEQ ID NO: 2281 - DNA, 20 bp, Arachis hypogaea
  source 1..20: mol_type = other DNA
tgttgaaagaattgcttgat

SEQ ID NO: 2282 - DNA, 20 bp, Arachis hypogaea
  source 1..20: mol_type = other DNA
gtattagagacattcatttt

SEQ ID NO: 2283 - DNA, 20 bp, Arachis hypogaea
  source 1..20: mol_type = other DNA
agaaataggatttggtgctc

SEQ ID NO: 2284 - DNA, 20 bp, Arachis hypogaea
  source 1..20: mol_type = other DNA
attgtggaagaaataggatt

SEQ ID NO: 2285 - DNA, 20 bp, Arachis hypogaea
  source 1..20: mol_type = other DNA
aaagatattgtggaagaaat

SEQ ID NO: 2286 - DNA, 20 bp, Arachis hypogaea
  source 1..20: mol_type = other DNA
tcaagaaaagaaagatattg

SEQ ID NO: 2287 - DNA, 20 bp, Arachis hypogaea
  source 1..20: mol_type = other DNA
ctgttgatattgcctttgtt

SEQ ID NO: 2288 - DNA, 20 bp, Arachis hypogaea
  source 1..20: mol_type = other DNA
ctattgcagatgccaaacaa

SEQ ID NO: 2289 - DNA, 20 bp, Arachis hypogaea
  source 1..20: mol_type = other DNA
acattttgaaatagaatgtg

SEQ ID NO: 2290 - DNA, 20 bp, Arachis hypogaea
  source 1..20: mol_type = other DNA
agatatttttcgaatgaaag

SEQ ID NO: 2291 - DNA, 20 bp, Arachis hypogaea
  source 1..20: mol_type = other DNA
agaaagcacattataacgta

SEQ ID NO: 2292 - DNA, 20 bp, Arachis hypogaea
  source 1..20: mol_type = other DNA
caaaaaatacaacaagaaaa

SEQ ID NO: 2293 - DNA, 20 bp, Arachis hypogaea
  source 1..20: mol_type = other DNA
tttgctgtaatgaaaaattt

SEQ ID NO: 2294 - DNA, 20 bp, Arachis hypogaea
  source 1..20: mol_type = other DNA
attttcacttcggtgagttg

SEQ ID NO: 2295 - DNA, 20 bp, Arachis hypogaea
  source 1..20: mol_type = other DNA
tgcatgaacaattttcactt

SEQ ID NO: 2296 - DNA, 20 bp, Arachis hypogaea
  source 1..20: mol_type = other DNA
ttcggtaccctttgtgattt

SEQ ID NO: 2297 - DNA, 20 bp, Arachis hypogaea
  source 1..20: mol_type = other DNA
gcacagaaccaaaatcacaa

SEQ ID NO: 2298 - DNA, 20 bp, Arachis hypogaea
  source 1..20: mol_type = other DNA
cacagaaccaaaatcacaaa

SEQ ID NO: 2299 - DNA, 20 bp, Arachis hypogaea
  source 1..20: mol_type = other DNA
cacatgaacgtttttcggtt

SEQ ID NO: 2300 - DNA, 20 bp, Arachis hypogaea
  source 1..20: mol_type = other DNA
ttaaccacatgaacgttttt

SEQ ID NO: 2301 - DNA, 20 bp, Arachis hypogaea
  source 1..20: mol_type = other DNA
cgaaccgaaaaacgttcatg

SEQ ID NO: 2302 - DNA, 20 bp, Arachis hypogaea
  source 1..20: mol_type = other DNA
tcttcagtacttcttttgca

SEQ ID NO: 2303 - DNA, 20 bp, Arachis hypogaea
  source 1..20: mol_type = other DNA
tgtgcttgttcttatttgtg

SEQ ID NO: 2304 - DNA, 20 bp, Arachis hypogaea
  source 1..20: mol_type = other DNA
aatttgaaaaacttttcttt

SEQ ID NO: 2305 - DNA, 20 bp, Arachis hypogaea
  source 1..20: mol_type = other DNA
tttttcaaatttcatcaatt

SEQ ID NO: 2306 - DNA, 20 bp, Arachis hypogaea
  source 1..20: mol_type = other DNA
tgaaaatgacattcgcagat

SEQ ID NO: 2307 - DNA, 20 bp, Arachis hypogaea
  source 1..20: mol_type = other DNA
atatctttctttaagtatca

SEQ ID NO: 2308 - DNA, 20 bp, Arachis hypogaea
  source 1..20: mol_type = other DNA
tggatagatttcaggacgaa

SEQ ID NO: 2309 - DNA, 20 bp, Arachis hypogaea
  source 1..20: mol_type = other DNA
cattatattggatagatttc

SEQ ID NO: 2310 - DNA, 20 bp, Arachis hypogaea
  source 1..20: mol_type = other DNA
gtaaaattgtctcattatat

SEQ ID NO: 2311 - DNA, 20 bp, Arachis hypogaea
  source 1..20: mol_type = other DNA
gagacaattttacagtagta

SEQ ID NO: 2312 - DNA, 20 bp, Arachis hypogaea
  source 1..20: mol_type = other DNA
gaattgaataagttttgttt

SEQ ID NO: 2313 - DNA, 20 bp, Arachis hypogaea
  source 1..20: mol_type = other DNA
agttttggttcggtaggttg

SEQ ID NO: 2314 - DNA, 20 bp, Arachis hypogaea
  source 1..20: mol_type = other DNA
tgaatgagttttggttcggt

SEQ ID NO: 2315 - DNA, 20 bp, Arachis hypogaea
  source 1..20: mol_type = other DNA
cgcatgaatgagttttggtt

SEQ ID NO: 2316 - DNA, 20 bp, Arachis hypogaea
  source 1..20: mol_type = other DNA
ttctacgcatgaatgagttt

SEQ ID NO: 2317 - DNA, 20 bp, Arachis hypogaea
  source 1..20: mol_type = other DNA
ttcggtggcttttgtgattt

SEQ ID NO: 2318 - DNA, 20 bp, Arachis hypogaea
  source 1..20: mol_type = other DNA
atgaacgtttttcagttcgg

SEQ ID NO: 2319 - DNA, 20 bp, Arachis hypogaea
  source 1..20: mol_type = other DNA
cacatgaacgtttttcagtt

SEQ ID NO: 2320 - DNA, 20 bp, Arachis hypogaea
  source 1..20: mol_type = other DNA
cgaactgaaaaacgttcatg

SEQ ID NO: 2321 - DNA, 20 bp, Arachis hypogaea
  source 1..20: mol_type = other DNA
cgtgcttgttcttattggtg

SEQ ID NO: 2322 - DNA, 20 bp, Arachis hypogaea
  source 1..20: mol_type = other DNA
atatacgtgcttgttcttat

SEQ ID NO: 2323 - DNA, 20 bp, Arachis hypogaea
  source 1..20: mol_type = other DNA
cattcaatttagtgtaacta

SEQ ID NO: 2324 - DNA, 20 bp, Arachis hypogaea
  source 1..20: mol_type = other DNA
tcattcaatttagtgtaact

SEQ ID NO: 2325 - DNA, 20 bp, Arachis hypogaea
  source 1..20: mol_type = other DNA
taacaacaaatttcattcca

SEQ ID NO: 2326 - DNA, 20 bp, Arachis hypogaea
  source 1..20: mol_type = other DNA
tgtacaatataactaggcct

SEQ ID NO: 2327 - DNA, 20 bp, Arachis hypogaea
  source 1..20: mol_type = other DNA
atgatttgtacaatataact

SEQ ID NO: 2328 - DNA, 20 bp, Arachis hypogaea
  source 1..20: mol_type = other DNA
ttagttttactggtttgctt

SEQ ID NO: 2329 - DNA, 20 bp, Arachis hypogaea
  source 1..20: mol_type = other DNA
tagttgcattttagttttac

SEQ ID NO: 2330 - DNA, 20 bp, Arachis hypogaea
  source 1..20: mol_type = other DNA
tagtaattttttcatacctt

SEQ ID NO: 2331 - DNA, 20 bp, Arachis hypogaea
  source 1..20: mol_type = other DNA
acagcaacaaagactaccaa

SEQ ID NO: 2332 - DNA, 20 bp, Arachis hypogaea
  source 1..20: mol_type = other DNA
ttgctgttttcgtttgtttc

SEQ ID NO: 2333 - DNA, 20 bp, Arachis hypogaea
  source 1..20: mol_type = other DNA
tgcagaaaccactactagaa

SEQ ID NO: 2334 - DNA, 20 bp, Arachis hypogaea
  source 1..20: mol_type = other DNA
ttctgattcctttctagtag

SEQ ID NO: 2335 - DNA, 20 bp, Arachis hypogaea
  source 1..20: mol_type = other DNA
ttgagagagattcgaaaaga

SEQ ID NO: 2336 - DNA, 20 bp, Arachis hypogaea
  source 1..20: mol_type = other DNA
aagtagtcatttcatttgta

SEQ ID NO: 2337 - DNA, 20 bp, Arachis hypogaea
  source 1..20: mol_type = other DNA
agtagtcatttcatttgtat

SEQ ID NO: 2338 - DNA, 20 bp, Arachis hypogaea
  source 1..20: mol_type = other DNA
gtagtcatttcatttgtatg

SEQ ID NO: 2339 - DNA, 20 bp, Arachis hypogaea
  source 1..20: mol_type = other DNA
tcacgtttatttattgagat

SEQ ID NO: 2340 - DNA, 20 bp, Arachis hypogaea
  source 1..20: mol_type = other DNA
cacgtttatttattgagatt

SEQ ID NO: 2341 - DNA, 20 bp, Arachis hypogaea
  source 1..20: mol_type = other DNA
gggaagcgcattagttgttt

SEQ ID NO: 2342 - DNA, 20 bp, Arachis hypogaea
  source 1..20: mol_type = other DNA
ggaagcgcattagttgtttt

SEQ ID NO: 2343 - DNA, 20 bp, Arachis hypogaea
  source 1..20: mol_type = other DNA
cgcattagttgttttgggtt

SEQ ID NO: 2344 - DNA, 20 bp, Arachis hypogaea
  source 1..20: mol_type = other DNA
atacatctatgtaatcaagt

SEQ ID NO: 2345 - DNA, 20 bp, Arachis hypogaea
  source 1..20: mol_type = other DNA
tctataataataataaaaac

SEQ ID NO: 2346 - DNA, 20 bp, Arachis hypogaea
  source 1..20: mol_type = other DNA
gtctataataataataaaaa

SEQ ID NO: 2347 - DNA, 20 bp, Arachis hypogaea
  source 1..20: mol_type = other DNA
ataattgagagagattaatt

SEQ ID NO: 2348 - DNA, 20 bp, Arachis hypogaea
  source 1..20: mol_type = other DNA
tataattatctgtgtatgta

SEQ ID NO: 2349 - DNA, 20 bp, Arachis hypogaea
  source 1..20: mol_type = other DNA
tatacttatattagttgtat

SEQ ID NO: 2350 - DNA, 20 bp, Arachis hypogaea
  source 1..20: mol_type = other DNA
tttggtgtgccattttctcg

SEQ ID NO: 2351 - DNA, 20 bp, Arachis hypogaea
  source 1..20: mol_type = other DNA
tggcgtaaacctcgagaaaa

SEQ ID NO: 2352 - DNA, 20 bp, Arachis hypogaea
  source 1..20: mol_type = other DNA
cttgagatcaggcttcgctt

SEQ ID NO: 2353 - DNA, 20 bp, Arachis hypogaea
  source 1..20: mol_type = other DNA
atggctacatacttgagatc

SEQ ID NO: 2354 - DNA, 20 bp, Arachis hypogaea
  source 1..20: mol_type = other DNA
gattcattcacatgagtgca

SEQ ID NO: 2355 - DNA, 20 bp, Arachis hypogaea
  source 1..20: mol_type = other DNA
tactcttttgcaattgactg

SEQ ID NO: 2356 - DNA, 20 bp, Arachis hypogaea
  source 1..20: mol_type = other DNA
ttaacaggtttcagtgtgag

SEQ ID NO: 2357 - DNA, 20 bp, Arachis hypogaea
  source 1..20: mol_type = other DNA
aagggctttgcatggttaac

SEQ ID NO: 2358 - DNA, 20 bp, Arachis hypogaea
  source 1..20: mol_type = other DNA
tgttgagtaagggctttgca

SEQ ID NO: 2359 - DNA, 20 bp, Arachis hypogaea
  source 1..20: mol_type = other DNA
aggtgcgagttgttgagtaa

SEQ ID NO: 2360 - DNA, 20 bp, Arachis hypogaea
  source 1..20: mol_type = other DNA
taggtgcgagttgttgagta

SEQ ID NO: 2361 - DNA, 20 bp, Arachis hypogaea
  source 1..20: mol_type = other DNA
ttgcaaggtgggtgacacgt

SEQ ID NO: 2362 - DNA, 20 bp, Arachis hypogaea
  source 1..20: mol_type = other DNA
gaaaagttgggttgcaaggt

SEQ ID NO: 2363 - DNA, 20 bp, Arachis hypogaea
  source 1..20: mol_type = other DNA
agaaaagttgggttgcaagg

SEQ ID NO: 2364 - DNA, 20 bp, Arachis hypogaea
  source 1..20: mol_type = other DNA
tatagaaaagttgggttgca

SEQ ID NO: 2365 - DNA, 20 bp, Arachis hypogaea
  source 1..20: mol_type = other DNA
gtgtttcttatagaaaagtt

SEQ ID NO: 2366 - DNA, 20 bp, Arachis hypogaea
  source 1..20: mol_type = other DNA
tgtgtttcttatagaaaagt

SEQ ID NO: 2367 - DNA, 20 bp, Arachis hypogaea
  source 1..20: mol_type = other DNA
gtttgtgtatgcatgtgacg

SEQ ID NO: 2368 - DNA, 20 bp, Arachis hypogaea
  source 1..20: mol_type = other DNA
agaaggaatgatatttaatt

SEQ ID NO: 2369 - DNA, 20 bp, Arachis hypogaea
  source 1..20: mol_type = other DNA
agggagaagaggtaaagaga

SEQ ID NO: 2370 - DNA, 20 bp, Arachis hypogaea
  source 1..20: mol_type = other DNA
aagcaggtttcagggagaag

SEQ ID NO: 2371 - DNA, 20 bp, Arachis hypogaea
  source 1..20: mol_type = other DNA
tctgaatgaagcaggtttca

SEQ ID NO: 2372 - DNA, 20 bp, Arachis hypogaea
  source 1..20: mol_type = other DNA
ctctgaatgaagcaggtttc

SEQ ID NO: 2373 - DNA, 20 bp, Arachis hypogaea
  source 1..20: mol_type = other DNA
tcttttactctgaatgaagc

SEQ ID NO: 2374 - DNA, 20 bp, Arachis hypogaea
  source 1..20: mol_type = other DNA
ttcagagtaaaagaaacata

SEQ ID NO: 2375 - DNA, 20 bp, Arachis hypogaea
  source 1..20: mol_type = other DNA
aaagaaacataaggaagaaa

SEQ ID NO: 2376 - DNA, 20 bp, Arachis hypogaea
  source 1..20: mol_type = other DNA
aagaaacataaggaagaaaa

SEQ ID NO: 2377 - DNA, 20 bp, Arachis hypogaea
  source 1..20: mol_type = other DNA
cagtcatggctgatggttgc

SEQ ID NO: 2378 - DNA, 20 bp, Arachis hypogaea
  source 1..20: mol_type = other DNA
gtacggtcagtcatggctga

SEQ ID NO: 2379 - DNA, 20 bp, Arachis hypogaea
  source 1..20: mol_type = other DNA
tggttgggtacggtcagtca

SEQ ID NO: 2380 - DNA, 20 bp, Arachis hypogaea
  source 1..20: mol_type = other DNA
ggacagtgtgtggttgggta

SEQ ID NO: 2381 - DNA, 20 bp, Arachis hypogaea
  source 1..20: mol_type = other DNA
gacttggacagtgtgtggtt

SEQ ID NO: 2382 - DNA, 20 bp, Arachis hypogaea
  source 1..20: mol_type = other DNA
ggacttggacagtgtgtggt

SEQ ID NO: 2383 - DNA, 20 bp, Arachis hypogaea
  source 1..20: mol_type = other DNA
gtgtggacttggacagtgtg

SEQ ID NO: 2384 - DNA, 20 bp, Arachis hypogaea
  source 1..20: mol_type = other DNA
ggccagctgtggtgtggact

SEQ ID NO: 2385 - DNA, 20 bp, Arachis hypogaea
  source 1..20: mol_type = other DNA
cgaaacggccagctgtggtg

SEQ ID NO: 2386 - DNA, 20 bp, Arachis hypogaea
  source 1..20: mol_type = other DNA
gtccaagtccacaccacagc

SEQ ID NO: 2387 - DNA, 20 bp, Arachis hypogaea
  source 1..20: mol_type = other DNA
gtcgccgaaacggccagctg

SEQ ID NO: 2388 - DNA, 20 bp, Arachis hypogaea
  source 1..20: mol_type = other DNA
cacaccacagctggccgttt

SEQ ID NO: 2389 - DNA, 20 bp, Arachis hypogaea
  source 1..20: mol_type = other DNA
cggcagcggtgtcgccgaaa

SEQ ID NO: 2390 - DNA, 20 bp, Arachis hypogaea
  source 1..20: mol_type = other DNA
cgtttcggcgacaccgctgc

SEQ ID NO: 2391 - DNA, 20 bp, Arachis hypogaea
  source 1..20: mol_type = other DNA
atagcggttagttccggcag

SEQ ID NO: 2392 - DNA, 20 bp, Arachis hypogaea
  source 1..20: mol_type = other DNA
gtcggcatagcggttagttc

SEQ ID NO: 2393 - DNA, 20 bp, Arachis hypogaea
  source 1..20: mol_type = other DNA
acgggcctctgtcggcatag

SEQ ID NO: 2394 - DNA, 20 bp, Arachis hypogaea
  source 1..20: mol_type = other DNA
actaaccgctatgccgacag

SEQ ID NO: 2395 - DNA, 20 bp, Arachis hypogaea
  source 1..20: mol_type = other DNA
agatgttgacgggcctctgt

SEQ ID NO: 2396 - DNA, 20 bp, Arachis hypogaea
  source 1..20: mol_type = other DNA
cgataaccttagatgttgac

SEQ ID NO: 2397 - DNA, 20 bp, Arachis hypogaea
  source 1..20: mol_type = other DNA
gcgataaccttagatgttga

SEQ ID NO: 2398 - DNA, 20 bp, Arachis hypogaea
  source 1..20: mol_type = other DNA
cagaggcccgtcaacatcta

SEQ ID NO: 2399 - DNA, 20 bp, Arachis hypogaea
  source 1..20: mol_type = other DNA
gatagggagtccagtgatga

SEQ ID NO: 2400 - DNA, 20 bp, Arachis hypogaea
  source 1..20: mol_type = other DNA
aaggttatcgccgtcatcac

SEQ ID NO: 2401 - DNA, 20 bp, Arachis hypogaea
  source 1..20: mol_type = other DNA
gtcatcactggactccctat

SEQ ID NO: 2402 - DNA, 20 bp, Arachis hypogaea
  source 1..20: mol_type = other DNA
atcactggactccctatcgg

SEQ ID NO: 2403 - DNA, 20 bp, Arachis hypogaea
  source 1..20: mol_type = other DNA
atagcaacgtgccgccgata

SEQ ID NO: 2404 - DNA, 20 bp, Arachis hypogaea
  source 1..20: mol_type = other DNA
aatagcaacgtgccgccgat

SEQ ID NO: 2405 - DNA, 20 bp, Arachis hypogaea
  source 1..20: mol_type = other DNA
cggcacgttgctattgttcg

SEQ ID NO: 2406 - DNA, 20 bp, Arachis hypogaea
  source 1..20: mol_type = other DNA
ggcacgttgctattgttcgc

SEQ ID NO: 2407 - DNA, 20 bp, Arachis hypogaea
  source 1..20: mol_type = other DNA
gcacgttgctattgttcgcg

SEQ ID NO: 2408 - DNA, 20 bp, Arachis hypogaea
  source 1..20: mol_type = other DNA
ttcgcggggcttgcccttgc

SEQ ID NO: 2409 - DNA, 20 bp, Arachis hypogaea
  source 1..20: mol_type = other DNA
cccaagcagggttccggcaa

SEQ ID NO: 2410 - DNA, 20 bp, Arachis hypogaea
  source 1..20: mol_type = other DNA
gcccaagcagggttccggca

SEQ ID NO: 2411 - DNA, 20 bp, Arachis hypogaea
  source 1..20: mol_type = other DNA
cgccagcccaagcagggttc

SEQ ID NO: 2412 - DNA, 20 bp, Arachis hypogaea
  source 1..20: mol_type = other DNA
gcccttgccggaaccctgct

SEQ ID NO: 2413 - DNA, 20 bp, Arachis hypogaea
  source 1..20: mol_type = other DNA
cccttgccggaaccctgctt

SEQ ID NO: 2414 - DNA, 20 bp, Arachis hypogaea
  source 1..20: mol_type = other DNA
ggtcaccgccagcccaagca

SEQ ID NO: 2415 - DNA, 20 bp, Arachis hypogaea
  source 1..20: mol_type = other DNA
tggtcaccgccagcccaagc

SEQ ID NO: 2416 - DNA, 20 bp, Arachis hypogaea
  source 1..20: mol_type = other DNA
tgccggaaccctgcttgggc

SEQ ID NO: 2417 - DNA, 20 bp, Arachis hypogaea
  source 1..20: mol_type = other DNA
cggaaccctgcttgggctgg

SEQ ID NO: 2418 - DNA, 20 bp, Arachis hypogaea
  source 1..20: mol_type = other DNA
gaagaggatgaaaagcgggg

SEQ ID NO: 2419 - DNA, 20 bp, Arachis hypogaea
  source 1..20: mol_type = other DNA
gctgaagaggatgaaaagcg

SEQ ID NO: 2420 - DNA, 20 bp, Arachis hypogaea
  source 1..20: mol_type = other DNA
ggctgaagaggatgaaaagc

SEQ ID NO: 2421 - DNA, 20 bp, Arachis hypogaea
  source 1..20: mol_type = other DNA
gggctgaagaggatgaaaag

SEQ ID NO: 2422 - DNA, 20 bp, Arachis hypogaea
  source 1..20: mol_type = other DNA
gaactatgacagggctgaag

SEQ ID NO: 2423 - DNA, 20 bp, Arachis hypogaea
  source 1..20: mol_type = other DNA
tggtggctggaactatgaca

SEQ ID NO: 2424 - DNA, 20 bp, Arachis hypogaea
  source 1..20: mol_type = other DNA
atggtggctggaactatgac

SEQ ID NO: 2425 - DNA, 20 bp, Arachis hypogaea
  source 1..20: mol_type = other DNA
agcccaacgacaatggtggc

SEQ ID NO: 2426 - DNA, 20 bp, Arachis hypogaea
  source 1..20: mol_type = other DNA
cgagagcccaacgacaatgg

SEQ ID NO: 2427 - DNA, 20 bp, Arachis hypogaea
  source 1..20: mol_type = other DNA
caccgagagcccaacgacaa

SEQ ID NO: 2428 - DNA, 20 bp, Arachis hypogaea
  source 1..20: mol_type = other DNA
gttccagccaccattgtcgt

SEQ ID NO: 2429 - DNA, 20 bp, Arachis hypogaea
  source 1..20: mol_type = other DNA
ttccagccaccattgtcgtt

SEQ ID NO: 2430 - DNA, 20 bp, Arachis hypogaea
  source 1..20: mol_type = other DNA
caccattgtcgttgggctct

SEQ ID NO: 2431 - DNA, 20 bp, Arachis hypogaea
  source 1..20: mol_type = other DNA
cattgtcgttgggctctcgg

SEQ ID NO: 2432 - DNA, 20 bp, Arachis hypogaea
  source 1..20: mol_type = other DNA
tgtcgttgggctctcggtgg

SEQ ID NO: 2433 - DNA, 20 bp, Arachis hypogaea
  source 1..20: mol_type = other DNA
gtcgttgggctctcggtggc

SEQ ID NO: 2434 - DNA, 20 bp, Arachis hypogaea
  source 1..20: mol_type = other DNA
tcgttgggctctcggtggcg

SEQ ID NO: 2435 - DNA, 20 bp, Arachis hypogaea
  source 1..20: mol_type = other DNA
gtggcggggttcttgacgtc

SEQ ID NO: 2436 - DNA, 20 bp, Arachis hypogaea
  source 1..20: mol_type = other DNA
ttcttgacgtcaggtgcatg

SEQ ID NO: 2437 - DNA, 20 bp, Arachis hypogaea
  source 1..20: mol_type = other DNA
tcttgacgtcaggtgcatgt

SEQ ID NO: 2438 - DNA, 20 bp, Arachis hypogaea
  source 1..20: mol_type = other DNA
gtcaggtgcatgtgggctga

SEQ ID NO: 2439 - DNA, 20 bp, Arachis hypogaea
  source 1..20: mol_type = other DNA
tcaggtgcatgtgggctgac

SEQ ID NO: 2440 - DNA, 20 bp, Arachis hypogaea
  source 1..20: mol_type = other DNA
caggtgcatgtgggctgacg

SEQ ID NO: 2441 - DNA, 20 bp, Arachis hypogaea
  source 1..20: mol_type = other DNA
cggggctgtcttcgttctcg

SEQ ID NO: 2442 - DNA, 20 bp, Arachis hypogaea
  source 1..20: mol_type = other DNA
ggggctgtcttcgttctcgt

SEQ ID NO: 2443 - DNA, 20 bp, Arachis hypogaea
  source 1..20: mol_type = other DNA
cgtgggtcatgaattacatc

SEQ ID NO: 2444 - DNA, 20 bp, Arachis hypogaea
  source 1..20: mol_type = other DNA
gcaccgatccgtgggtctgc

SEQ ID NO: 2445 - DNA, 20 bp, Arachis hypogaea
  source 1..20: mol_type = other DNA
aattacatccggcagaccca

SEQ ID NO: 2446 - DNA, 20 bp, Arachis hypogaea
  source 1..20: mol_type = other DNA
catccggcagacccacggat

SEQ ID NO: 2447 - DNA, 20 bp, Arachis hypogaea
  source 1..20: mol_type = other DNA
ctgctccggcaccgatccgt

SEQ ID NO: 2448 - DNA, 20 bp, Arachis hypogaea
  source 1..20: mol_type = other DNA
gctgctccggcaccgatccg

SEQ ID NO: 2449 - DNA, 20 bp, Arachis hypogaea
  source 1..20: mol_type = other DNA
gcagacccacggatcggtgc

SEQ ID NO: 2450 - DNA, 20 bp, Arachis hypogaea
  source 1..20: mol_type = other DNA
tttgccatttccagctgctc

SEQ ID NO: 2451 - DNA, 20 bp, Arachis hypogaea
  source 1..20: mol_type = other DNA
cggatcggtgccggagcagc

SEQ ID NO: 2452 - DNA, 20 bp, Arachis hypogaea
  source 1..20: mol_type = other DNA
ggtgccggagcagctggaaa

SEQ ID NO: 2453 - DNA, 20 bp, Arachis hypogaea
  source 1..20: mol_type = other DNA
ggaaatggcaaagcaccgca

SEQ ID NO: 2454 - DNA, 20 bp, Arachis hypogaea
  source 1..20: mol_type = other DNA
aaccggccacgtcagccatg

SEQ ID NO: 2455 - DNA, 20 bp, Arachis hypogaea
  source 1..20: mol_type = other DNA
aaagcaccgcatggctgacg

SEQ ID NO: 2456 - DNA, 20 bp, Arachis hypogaea
  source 1..20: mol_type = other DNA
caccgcatggctgacgtggc

SEQ ID NO: 2457 - DNA, 20 bp, Arachis hypogaea
  source 1..20: mol_type = other DNA
cgtcttctgtccaacgtaac

SEQ ID NO: 2458 - DNA, 20 bp, Arachis hypogaea
  source 1..20: mol_type = other DNA
gctgacgtggccggttacgt

SEQ ID NO: 2459 - DNA, 20 bp, Arachis hypogaea
  source 1..20: mol_type = other DNA
ttacgttggacagaagacga

SEQ ID NO: 2460 - DNA, 20 bp, Arachis hypogaea
  source 1..20: mol_type = other DNA
ggacagaagacgaaggatgt

SEQ ID NO: 2461 - DNA, 20 bp, Arachis hypogaea
  source 1..20: mol_type = other DNA
ggatgtaggacagaagacca

SEQ ID NO: 2462 - DNA, 20 bp, Arachis hypogaea
  source 1..20: mol_type = other DNA
tatctcttgcccaacttcct

SEQ ID NO: 2463 - DNA, 20 bp, Arachis hypogaea
  source 1..20: mol_type = other DNA
ggacagaagaccaaggaagt

SEQ ID NO: 2464 - DNA, 20 bp, Arachis hypogaea
  source 1..20: mol_type = other DNA
gacagaagaccaaggaagtt

SEQ ID NO: 2465 - DNA, 20 bp, Arachis hypogaea
  source 1..20: mol_type = other DNA
tgggcaagagatacagacca

SEQ ID NO: 2466 - DNA, 20 bp, Arachis hypogaea
  source 1..20: mol_type = other DNA
agagatacagaccaaggctc

SEQ ID NO: 2467 - DNA, 20 bp, Arachis hypogaea
  source 1..20: mol_type = other DNA
tctctttgaatcctgagcct

SEQ ID NO: 2468 - DNA, 20 bp, Arachis hypogaea
  source 1..20: mol_type = other DNA
aagagaacttgatagaatag

SEQ ID NO: 2469 - DNA, 20 bp, Arachis hypogaea
  source 1..20: mol_type = other DNA
agaatagtggtttaagctta

SEQ ID NO: 2470 - DNA, 20 bp, Arachis hypogaea
  source 1..20: mol_type = other DNA
ggtttaagcttaaggatgaa

SEQ ID NO: 2471 - DNA, 20 bp, Arachis hypogaea
  source 1..20: mol_type = other DNA
gtttaagcttaaggatgaaa

SEQ ID NO: 2472 - DNA, 20 bp, Arachis hypogaea
  source 1..20: mol_type = other DNA
tttaagcttaaggatgaaag

SEQ ID NO: 2473 - DNA, 20 bp, Arachis hypogaea
  source 1..20: mol_type = other DNA
taaggatgaaaggggtctaa

SEQ ID NO: 2474 - DNA, 20 bp, Arachis hypogaea
  source 1..20: mol_type = other DNA
aaggatgaaaggggtctaat

SEQ ID NO: 2475 - DNA, 20 bp, Arachis hypogaea
  source 1..20: mol_type = other DNA
aggggtctaatgggttttga

SEQ ID NO: 2476 - DNA, 3694 bp, Arachis hypogaea
  source 1..3694: mol_type = genomic DNA
tctctctctctctctctctctctctctctctctctctctctctctctctctctctctctctctctctctctctctctctctctctctctctctcttcaatattttattttttgccaagcgacttgaattcatttttttagtaatattttttaatataatttgacccctttatataaaaaaggtaaatactatagtgtctaacttattaaaaaggtaaaaaaatagtatttaataaattttaaatattttattttttacttataaaagtaagttagacaatttaatcacaacaataaaaggtaccataaaatctaccaaaagaaaaaaaaaagttatgagtaatatgtaaaatcagtttttgaaaaatatttaataggccattttaatttttaattaatttttaattatcaaattgttgtccaaataagagggacttatctaagaattttaaaaattattaggtatttttatgtttttattaagtaataataaaaaatttaatttgtctaattttttactaaaatttaatgtagaaattaatttgtttaagaatgggggtattggatgagtaagtgattttttatctacaattttgtctaatattattgatcattttactattttaaaatattttaacatcttaatttatcacttatgagttataacctaattcattctaaatattttaactttttgttaaatattttagtaatgataataataatggtatactactttgtcgtaatcataattttgtctgaagctatatgttaatttagttatatagctaaggcaaagtagtcgatctagatgtatacaataagttgcattacttttttaacctataaattactaatcatatgacaattttttttaatccatttataactagctagtgatatacttctctctgttttttttcacgaccactttttcaatgcgaaagatagataattgagataaataataatacattagaaaacaaattatgaaggacatacaacatatagatagaaatatctatcacttactaaaaccgaaaggaatattcctatacatgcatgttatgggattttgccaatgttgttttatatatatatatgtatgtcctaccttttgaaaaatagtaaagtaacaatgacttccaaaattaaactacgtatataaaaagaaggacttccaaaagaataaaagcacatagattaagaaaattaattaatatataaaaatactgtttattaaatggatcactaatagttatttaattattataaataaattccttaatcttttgagataatattgcacgtatctcgtttacagtgtaaacgaaataataagcgtgacacatgtatatttcgtttacagtgagaatggaatttttttttcttatttattttttttttttgctcttgtagctaatgactaatggaaaggttgttggtggaattcaccgtgctgtgacaaattcaaaaactgcacgaacaagtgttgtttatttaatctacccatcgcctaaagctattattaaacctgctgaagaatttgtgaatgaaaaaactccaacacttggtaagtttatgaactttgaagatttccatgcttattacgttaagaacggtatgaaaattgaagaggagtacttcaagatcaagccataatatgttccacaaattaaatgatctatgtagtggtggtataatgacattatgttattaattaataaatgtgcagtgtgcacatatttatatatatatatgtcatcgtatgtatgtatgtttttattagtgagttgttttatttctcctaaaagttcaccttcatgtagaggtgcttgggttgttttattttattgtgtgtatatgtacatatgcgtaaattaaataagctagtactgctttatgaaataaatatccaaatctgaatttgcatgcaagtttatgccaaattaatttgtctaatggtattgtagcaatgtggtattttattttcagtaggactgttcataaaaaaatataaaatggttaattggtttaaaaaattaaccaaattttaaaataactgatttttttaaaatagcccataaactataactaattttagaaagtggttaactaaattagtaaaaaccagtttgtaaatcgacagattaacaaaacaaaatcggttagatcgtttgaaattttaaaattaattttttaatataaatgtgttacaaatttaagttgattttataatagataaattaaaaatgactaattgatttttttaaattgttaaaatttcttttgtaagttaaaattaattttgtataaaattggttaatcatacattaatcctcaagtaaatttttttacaaatctatttagataaataagatatttccatcataaaaaatttgataattttacattggaattttatgacaaatttttaataagaatgaaaaaatgaaaaataaaaaaagtaataaagatcaatctttggctaatttttttgtaatttttaaataattaattaaaaaattacgtaaaaatatataaattgttcgttatataacttaatctatagactatagtagacataaaacattagccactaaaatatatattttttggtgacttaaatactaaaatatatattaaatcaattatattaaatatataataaaattacctattaaaattaattattagaataaaatatatattaaaataagttaaattatatatatatatatgcaggcttgatgagtgagttttgtttgtgatgtaatgtatgtaacagttttagataagaattgaaaaatatgacgccaacaaagaaaagaaaagaaaagggaaaaggcaaacgtgtcatgaaacccagaaatgggttttgcatgcagcggctgcatgagaagcacctcaacacgtgccacgacacccaccttgtgaattgtgaagattgccacccggagacacctatctcctcctctccccaatttaaaacccacattttccgctctctattcattcgcattagcattagccctttcatttcacttcataattaattaataacatggctgaagcactctactacggcggccgccaacgccaagagcaaccaaggtccacccagcttgtcaaggccaccaccgctgttgtcgccggaggctccctcttgatcctcgccggccttgtgctggccggcaccgtcattggcctcacaacgatcacaccgctcttcgtgatcttcagcccggtgcttgtgccagctgtcatcactgtggcactcttaggcttggggttcttggcctctggaggcttcggcgtggcggcaataacagtgctgacgtggatctataggtacgtaacaggtaagcatccacctggcgccaaccaattggacacagcccgccacaagctgatgggcaaggcgcgtgagattaaggactttggtcaacaacaaaccagtggggcccaggcttcttgagcataccatcttcgtttgcatctttgtttgcacgcacgtccacgccatcatttatctttttcgaattgttatggtttattttattttatttaattttttatgagtctgggtttcttgtattaccgttgtttatatatttcctgttatcatccatcaattttaatcctgcctagtcatattgacatgaattcaatatatatagctaggattatcgtca

SEQ ID NO: 2477 - protein, 137 aa, Arachis hypogaea
MAEALYYGGRQRQEQPRSTQLVKATTAVVAGGSLLILAGLVLAGTVIGLTTITPLFVIFSPVLVPAVITVALLGLGFLASGGFGVAAITVLTWIYRYVTGKHPPGANQLDTARHKLMGKAREIKDFGQQQTSGAQAS

SEQ ID NO: 2478 - DNA, 20 bp, Arachis hypogaea
  source 1..20: mol_type = other DNA
aaaaatgaattcaagtcgct

SEQ ID NO: 2479 - DNA, 20 bp, Arachis hypogaea
  source 1..20: mol_type = other DNA
tttaccttttttatataaag

SEQ ID NO: 2480 - DNA, 20 bp, Arachis hypogaea
  source 1..20: mol_type = other DNA
atttaccttttttatataaa

SEQ ID NO: 2481 - DNA, 20 bp, Arachis hypogaea
  source 1..20: mol_type = other DNA
tatttaccttttttatataa

SEQ ID NO: 2482 - DNA, 20 bp, Arachis hypogaea
  source 1..20: mol_type = other DNA
ttgacccctttatataaaaa

SEQ ID NO: 2483 - DNA, 20 bp, Arachis hypogaea
  source 1..20: mol_type = other DNA
tagtgtctaacttattaaaa

SEQ ID NO: 2484 - DNA, 20 bp, Arachis hypogaea
  source 1..20: mol_type = other DNA
aatttaatcacaacaataaa

SEQ ID NO: 2485 - DNA, 20 bp, Arachis hypogaea
  source 1..20: mol_type = other DNA
ttttcttttggtagatttta

SEQ ID NO: 2486 - DNA, 20 bp, Arachis hypogaea
  source 1..20: mol_type = other DNA
cataacttttttttttcttt

SEQ ID NO: 2487 - DNA, 20 bp, Arachis hypogaea
  source 1..20: mol_type = other DNA
gtttttgaaaaatatttaat

SEQ ID NO: 2488 - DNA, 20 bp, Arachis hypogaea
  source 1..20: mol_type = other DNA
aaattaattaaaaattaaaa

SEQ ID NO: 2489 - DNA, 20 bp, Arachis hypogaea
  source 1..20: mol_type = other DNA
caaattgttgtccaaataag

SEQ ID NO: 2490 - DNA, 20 bp, Arachis hypogaea
  source 1..20: mol_type = other DNA
ttagataagtccctcttatt

SEQ ID NO: 2491 - DNA, 20 bp, Arachis hypogaea
  source 1..20: mol_type = other DNA
aaattgttgtccaaataaga

SEQ ID NO: 2492 - DNA, 20 bp, Arachis hypogaea
  source 1..20: mol_type = other DNA
taagaattttaaaaattatt

SEQ ID NO: 2493 - DNA, 20 bp, Arachis hypogaea
  source 1..20: mol_type = other DNA
gaaattaatttgtttaagaa

SEQ ID NO: 2494 - DNA, 20 bp, Arachis hypogaea
  source 1..20: mol_type = other DNA
aaattaatttgtttaagaat

SEQ ID NO: 2495 - DNA, 20 bp, Arachis hypogaea
  source 1..20: mol_type = other DNA
aattaatttgtttaagaatg

SEQ ID NO: 2496 - DNA, 20 bp, Arachis hypogaea
  source 1..20: mol_type = other DNA
attaatttgtttaagaatgg

SEQ ID NO: 2497 - DNA, 20 bp, Arachis hypogaea
  source 1..20: mol_type = other DNA
ttgtttaagaatgggggtat

SEQ ID NO: 2498 - DNA, 20 bp, Arachis hypogaea
  source 1..20: mol_type = other DNA
taaaatatttagaatgaatt

SEQ ID NO: 2499 - DNA, 20 bp, Arachis hypogaea
  source 1..20: mol_type = other DNA
tttagtaatgataataataa

SEQ ID NO: 2500 - DNA, 20 bp, Arachis hypogaea
  source 1..20: mol_type = other DNA
ttaatttagttatatagcta

SEQ ID NO: 2501 - DNA, 20 bp, Arachis hypogaea
  source 1..20: mol_type = other DNA
tcatatgattagtaatttat

SEQ ID NO: 2502 - DNA, 20 bp, Arachis hypogaea
  source 1..20: mol_type = other DNA
tatcactagctagttataaa

SEQ ID NO: 2503 - DNA, 20 bp, Arachis hypogaea
  source 1..20: mol_type = other DNA
tatctttcgcattgaaaaag

SEQ ID NO: 2504 - DNA, 20 bp, Arachis hypogaea
  source 1..20: mol_type = other DNA
cattagaaaacaaattatga

SEQ ID NO: 2505 - DNA, 20 bp, Arachis hypogaea
  source 1..20: mol_type = other DNA
tatcacttactaaaaccgaa

SEQ ID NO: 2506 - DNA, 20 bp, Arachis hypogaea
  source 1..20: mol_type = other DNA
atgtataggaatattccttt

SEQ ID NO: 2507 - DNA, 20 bp, Arachis hypogaea
  source 1..20: mol_type = other DNA
atcccataacatgcatgtat

SEQ ID NO: 2508 - DNA, 20 bp, Arachis hypogaea
  source 1..20: mol_type = other DNA
attcctatacatgcatgtta

SEQ ID NO: 2509 - DNA, 20 bp, Arachis hypogaea
  source 1..20: mol_type = other DNA
ttcctatacatgcatgttat

SEQ ID NO: 2510 - DNA, 20 bp, Arachis hypogaea
  source 1..20: mol_type = other DNA
atatatatataaaacaacat

SEQ ID NO: 2511 - DNA, 20 bp, Arachis hypogaea
  source 1..20: mol_type = other DNA
tttactatttttcaaaaggt

SEQ ID NO: 2512 - DNA, 20 bp, Arachis hypogaea
  source 1..20: mol_type = other DNA
ttactttactatttttcaaa

SEQ ID NO: 2513 - DNA, 20 bp, Arachis hypogaea
  source 1..20: mol_type = other DNA
ttatatacgtagtttaattt

SEQ ID NO: 2514 - DNA, 20 bp, Arachis hypogaea
  source 1..20: mol_type = other DNA
aaactacgtatataaaaaga

SEQ ID NO: 2515 - DNA, 20 bp, Arachis hypogaea
  source 1..20: mol_type = other DNA
tctatgtgcttttattcttt

SEQ ID NO: 2516 - DNA, 20 bp, Arachis hypogaea
  source 1..20: mol_type = other DNA
taaaaatactgtttattaaa

SEQ ID NO: 2517 - DNA, 20 bp, Arachis hypogaea
  source 1..20: mol_type = other DNA
aatattatctcaaaagatta

SEQ ID NO: 2518 - DNA, 20 bp, Arachis hypogaea
  source 1..20: mol_type = other DNA
tatttcgtttacagtgagaa

SEQ ID NO: 2519 - DNA, 20 bp, Arachis hypogaea
  source 1..20: mol_type = other DNA
ctcttgtagctaatgactaa

SEQ ID NO: 2520 - DNA, 20 bp, Arachis hypogaea
  source 1..20: mol_type = other DNA
gtagctaatgactaatggaa

SEQ ID NO: 2521 - DNA, 20 bp, Arachis hypogaea
  source 1..20: mol_type = other DNA
atgactaatggaaaggttgt

SEQ ID NO: 2522 - DNA, 20 bp, Arachis hypogaea
  source 1..20: mol_type = other DNA
actaatggaaaggttgttgg

SEQ ID NO: 2523 - DNA, 20 bp, Arachis hypogaea
  source 1..20: mol_type = other DNA
tttttgaatttgtcacagca

SEQ ID NO: 2524 - DNA, 20 bp, Arachis hypogaea
  source 1..20: mol_type = other DNA
taataatagctttaggcgat

SEQ ID NO: 2525 - DNA, 20 bp, Arachis hypogaea
  source 1..20: mol_type = other DNA
ttaataatagctttaggcga

SEQ ID NO: 2526 - DNA, 20 bp, Arachis hypogaea
  source 1..20: mol_type = other DNA
gcaggtttaataatagcttt

SEQ ID NO: 2527 - DNA, 20 bp, Arachis hypogaea
  source 1..20: mol_type = other DNA
tcattcacaaattcttcagc

SEQ ID NO: 2528 - DNA, 20 bp, Arachis hypogaea
  source 1..20: mol_type = other DNA
aatgaaaaaactccaacact

SEQ ID NO: 2529 - DNA, 20 bp, Arachis hypogaea
  source 1..20: mol_type = other DNA
ttcataaacttaccaagtgt

SEQ ID NO: 2530 - DNA, 20 bp, Arachis hypogaea
  source 1..20: mol_type = other DNA
cgttcttaacgtaataagca

SEQ ID NO: 2531 - DNA, 20 bp, Arachis hypogaea
  source 1..20: mol_type = other DNA
catgcttattacgttaagaa

SEQ ID NO: 2532 - DNA, 20 bp, Arachis hypogaea
  source 1..20: mol_type = other DNA
gaacggtatgaaaattgaag

SEQ ID NO: 2533 - DNA, 20 bp, Arachis hypogaea
  source 1..20: mol_type = other DNA
ttaatttgtggaacatatta

SEQ ID NO: 2534 - DNA, 20 bp, Arachis hypogaea
  source 1..20: mol_type = other DNA
tacatagatcatttaatttg

SEQ ID NO: 2535 - DNA, 20 bp, Arachis hypogaea
  source 1..20: mol_type = other DNA
aaattaaatgatctatgtag

SEQ ID NO: 2536 - DNA, 20 bp, Arachis hypogaea
  source 1..20: mol_type = other DNA
ttaaatgatctatgtagtgg

SEQ ID NO: 2537 - DNA, 20 bp, Arachis hypogaea
  source 1..20: mol_type = other DNA
ctacatgaaggtgaactttt

SEQ ID NO: 2538 - DNA, 20 bp, Arachis hypogaea
  source 1..20: mol_type = other DNA
acccaagcacctctacatga

SEQ ID NO: 2539 - DNA, 20 bp, Arachis hypogaea
  source 1..20: mol_type = other DNA
aaaagttcaccttcatgtag

SEQ ID NO: 2540 - DNA, 20 bp, Arachis hypogaea
  source 1..20: mol_type = other DNA
caccttcatgtagaggtgct

SEQ ID NO: 2541 - DNA, 20 bp, Arachis hypogaea
  source 1..20: mol_type = other DNA
accttcatgtagaggtgctt

SEQ ID NO: 2542 - DNA, 20 bp, Arachis hypogaea
  source 1..20: mol_type = other DNA
cttgcatgcaaattcagatt

SEQ ID NO: 2543 - DNA, 20 bp, Arachis hypogaea
  source 1..20: mol_type = other DNA
taccattagacaaattaatt

SEQ ID NO: 2544 - DNA, 20 bp, Arachis hypogaea
  source 1..20: mol_type = other DNA
tgccaaattaatttgtctaa

SEQ ID NO: 2545 - DNA, 20 bp, Arachis hypogaea
  source 1..20: mol_type = other DNA
ctaatggtattgtagcaatg

SEQ ID NO: 2546 - DNA, 20 bp, Arachis hypogaea
  source 1..20: mol_type = other DNA
tgtggtattttattttcagt

SEQ ID NO: 2547 - DNA, 20 bp, Arachis hypogaea
  source 1..20: mol_type = other DNA
gttcataaaaaaatataaaa

SEQ ID NO: 2548 - DNA, 20 bp, Arachis hypogaea
  source 1..20: mol_type = other DNA
aaaaatataaaatggttaat

SEQ ID NO: 2549 - DNA, 20 bp, Arachis hypogaea
  source 1..20: mol_type = other DNA
aaatcagttattttaaaatt

SEQ ID NO: 2550 - DNA, 20 bp, Arachis hypogaea
  source 1..20: mol_type = other DNA
taaaattagttatagtttat

SEQ ID NO: 2551 - DNA, 20 bp, Arachis hypogaea
  source 1..20: mol_type = other DNA
ctaaaattagttatagttta

SEQ ID NO: 2552 - DNA, 20 bp, Arachis hypogaea
  source 1..20: mol_type = other DNA
ctataactaattttagaaag

SEQ ID NO: 2553 - DNA, 20 bp, Arachis hypogaea
  source 1..20: mol_type = other DNA
taatctgtcgatttacaaac

SEQ ID NO: 2554 - DNA, 20 bp, Arachis hypogaea
  source 1..20: mol_type = other DNA
acagattaacaaaacaaaat

SEQ ID NO: 2555 - DNA, 20 bp, Arachis hypogaea
  source 1..20: mol_type = other DNA
aaattaattttgtataaaat

SEQ ID NO: 2556 - DNA, 20 bp, Arachis hypogaea
  source 1..20: mol_type = other DNA
tttgtaaaaaaatttacttg

SEQ ID NO: 2557 - DNA, 20 bp, Arachis hypogaea
  source 1..20: mol_type = other DNA
aattatcaaattttttatga

SEQ ID NO: 2558 - DNA, 20 bp, Arachis hypogaea
  source 1..20: mol_type = other DNA
aaaatttgataattttacat

SEQ ID NO: 2559 - DNA, 20 bp, Arachis hypogaea
  source 1..20: mol_type = other DNA
aagtaataaagatcaatctt

SEQ ID NO: 2560 - DNA, 20 bp, Arachis hypogaea
  source 1..20: mol_type = other DNA
ccaaaaaatatatattttag

SEQ ID NO: 2561 - DNA, 20 bp, Arachis hypogaea
  source 1..20: mol_type = other DNA
ccactaaaatatatattttt

SEQ ID NO: 2562 - DNA, 20 bp, Arachis hypogaea
  source 1..20: mol_type = other DNA
ttctaataattaattttaat

SEQ ID NO: 2563 - DNA, 20 bp, Arachis hypogaea
  source 1..20: mol_type = other DNA
aattatatatatatatatgc

SEQ ID NO: 2564 - DNA, 20 bp, Arachis hypogaea
  source 1..20: mol_type = other DNA
ttttcttttcttttctttgt

SEQ ID NO: 2565 - DNA, 20 bp, Arachis hypogaea
  source 1..20: mol_type = other DNA
aacaaagaaaagaaaagaaa

SEQ ID NO: 2566 - DNA, 20 bp, Arachis hypogaea
  source 1..20: mol_type = other DNA
acaaagaaaagaaaagaaaa

SEQ ID NO: 2567 - DNA, 20 bp, Arachis hypogaea
  source 1..20: mol_type = other DNA
aaaagaaaagaaaagggaaa

SEQ ID NO: 2568 - DNA, 20 bp, Arachis hypogaea
  source 1..20: mol_type = other DNA
cgtgtcatgaaacccagaaa

SEQ ID NO: 2569 - DNA, 20 bp, Arachis hypogaea
  source 1..20: mol_type = other DNA
gtgtcatgaaacccagaaat

SEQ ID NO: 2570 - DNA, 20 bp, Arachis hypogaea
  source 1..20: mol_type = other DNA
tgcatgcaaaacccatttct

SEQ ID NO: 2571 - DNA, 20 bp, Arachis hypogaea
  source 1..20: mol_type = other DNA
ctgcatgcaaaacccatttc

SEQ ID NO: 2572 - DNA, 20 bp, Arachis hypogaea
  source 1..20: mol_type = other DNA
gaaatgggttttgcatgcag

SEQ ID NO: 2573 - DNA, 20 bp, Arachis hypogaea
  source 1..20: mol_type = other DNA
gggtgtcgtggcacgtgttg

SEQ ID NO: 2574 - DNA, 20 bp, Arachis hypogaea
  source 1..20: mol_type = other DNA
aattcacaaggtgggtgtcg

SEQ ID NO: 2575 - DNA, 20 bp, Arachis hypogaea
  source 1..20: mol_type = other DNA
atcttcacaattcacaaggt

SEQ ID NO: 2576 - DNA, 20 bp, Arachis hypogaea
  source 1..20: mol_type = other DNA
aatcttcacaattcacaagg

SEQ ID NO: 2577 - DNA, 20 bp, Arachis hypogaea
  source 1..20: mol_type = other DNA
ggcaatcttcacaattcaca

SEQ ID NO: 2578 - DNA, 20 bp, Arachis hypogaea
  source 1..20: mol_type = other DNA
gaattgtgaagattgccacc

SEQ ID NO: 2579 - DNA, 20 bp, Arachis hypogaea
  source 1..20: mol_type = other DNA
aggagataggtgtctccggg

SEQ ID NO: 2580 - DNA, 20 bp, Arachis hypogaea
  source 1..20: mol_type = other DNA
aggaggagataggtgtctcc

SEQ ID NO: 2581 - DNA, 20 bp, Arachis hypogaea
  source 1..20: mol_type = other DNA
gaggaggagataggtgtctc

SEQ ID NO: 2582 - DNA, 20 bp, Arachis hypogaea
  source 1..20: mol_type = other DNA
aattggggagaggaggagat

SEQ ID NO: 2583 - DNA, 20 bp, Arachis hypogaea
  source 1..20: mol_type = other DNA
ggttttaaattggggagagg

SEQ ID NO: 2584 - DNA, 20 bp, Arachis hypogaea
  source 1..20: mol_type = other DNA
gtgggttttaaattggggag

SEQ ID NO: 2585 - DNA, 20 bp, Arachis hypogaea
  source 1..20: mol_type = other DNA
aaaatgtgggttttaaattg

SEQ ID NO: 2586 - DNA, 20 bp, Arachis hypogaea
  source 1..20: mol_type = other DNA
gaaaatgtgggttttaaatt

SEQ ID NO: 2587 - DNA, 20 bp, Arachis hypogaea
  source 1..20: mol_type = other DNA
ggaaaatgtgggttttaaat

SEQ ID NO: 2588 - DNA, 20 bp, Arachis hypogaea
  source 1..20: mol_type = other DNA
gaatagagagcggaaaatgt

SEQ ID NO: 2589 - DNA, 20 bp, Arachis hypogaea
  source 1..20: mol_type = other DNA
tgaatagagagcggaaaatg

SEQ ID NO: 2590 - DNA, 20 bp, Arachis hypogaea
  source 1..20: mol_type = other DNA
taatgcgaatgaatagagag

SEQ ID NO: 2591 - DNA, 20 bp, Arachis hypogaea
  source 1..20: mol_type = other DNA
aattatgaagtgaaatgaaa

SEQ ID NO: 2592 - DNA, 20 bp, Arachis hypogaea
  source 1..20: mol_type = other DNA
taattatgaagtgaaatgaa

SEQ ID NO: 2593 - DNA, 20 bp, Arachis hypogaea
  source 1..20: mol_type = other DNA
ttcataattaattaataaca

SEQ ID NO: 2594 - DNA, 20 bp, Arachis hypogaea
  source 1..20: mol_type = other DNA
atggctgaagcactctacta

SEQ ID NO: 2595 - DNA, 20 bp, Arachis hypogaea
  source 1..20: mol_type = other DNA
gctgaagcactctactacgg

SEQ ID NO: 2596 - DNA, 20 bp, Arachis hypogaea
  source 1..20: mol_type = other DNA
ttggttgctcttggcgttgg

SEQ ID NO: 2597 - DNA, 20 bp, Arachis hypogaea
  source 1..20: mol_type = other DNA
accttggttgctcttggcgt

SEQ ID NO: 2598 - DNA, 20 bp, Arachis hypogaea
  source 1..20: mol_type = other DNA
gggtggaccttggttgctct

SEQ ID NO: 2599 - DNA, 20 bp, Arachis hypogaea
  source 1..20: mol_type = other DNA
gccaacgccaagagcaacca

SEQ ID NO: 2600 - DNA, 20 bp, Arachis hypogaea
  source 1..20: mol_type = other DNA
ttgacaagctgggtggacct

SEQ ID NO: 2601 - DNA, 20 bp, Arachis hypogaea
  source 1..20: mol_type = other DNA
ggtggccttgacaagctggg

SEQ ID NO: 2602 - DNA, 20 bp, Arachis hypogaea
  source 1..20: mol_type = other DNA
ggtggtggccttgacaagct

SEQ ID NO: 2603 - DNA, 20 bp, Arachis hypogaea
  source 1..20: mol_type = other DNA
cggtggtggccttgacaagc

SEQ ID NO: 2604 - DNA, 20 bp, Arachis hypogaea
  source 1..20: mol_type = other DNA
aaggtccacccagcttgtca

SEQ ID NO: 2605 - DNA, 20 bp, Arachis hypogaea
  source 1..20: mol_type = other DNA
tccggcgacaacagcggtgg

SEQ ID NO: 2606 - DNA, 20 bp, Arachis hypogaea
  source 1..20: mol_type = other DNA
gcctccggcgacaacagcgg

SEQ ID NO: 2607 - DNA, 20 bp, Arachis hypogaea
  source 1..20: mol_type = other DNA
ggagcctccggcgacaacag

SEQ ID NO: 2608 - DNA, 20 bp, Arachis hypogaea
  source 1..20: mol_type = other DNA
gccaccaccgctgttgtcgc

SEQ ID NO: 2609 - DNA, 20 bp, Arachis hypogaea
  source 1..20: mol_type = other DNA
accaccgctgttgtcgccgg

SEQ ID NO: 2610 - DNA, 20 bp, Arachis hypogaea
  source 1..20: mol_type = other DNA
gaggatcaagagggagcctc

SEQ ID NO: 2611 - DNA, 20 bp, Arachis hypogaea
  source 1..20: mol_type = other DNA
aaggccggcgaggatcaaga

SEQ ID NO: 2612 - DNA, 20 bp, Arachis hypogaea
  source 1..20: mol_type = other DNA
caaggccggcgaggatcaag

SEQ ID NO: 2613 - DNA, 20 bp, Arachis hypogaea
  source 1..20: mol_type = other DNA
ggctccctcttgatcctcgc

SEQ ID NO: 2614 - DNA, 20 bp, Arachis hypogaea
  source 1..20: mol_type = other DNA
cggccagcacaaggccggcg

SEQ ID NO: 2615 - DNA, 20 bp, Arachis hypogaea
  source 1..20: mol_type = other DNA
ggtgccggccagcacaaggc

SEQ ID NO: 2616 - DNA, 20 bp, Arachis hypogaea
  source 1..20: mol_type = other DNA
gatcctcgccggccttgtgc

SEQ ID NO: 2617 - DNA, 20 bp, Arachis hypogaea
  source 1..20: mol_type = other DNA
tgacggtgccggccagcaca

SEQ ID NO: 2618 - DNA, 20 bp, Arachis hypogaea
  source 1..20: mol_type = other DNA
ctcgccggccttgtgctggc

SEQ ID NO: 2619 - DNA, 20 bp, Arachis hypogaea
  source 1..20: mol_type = other DNA
tgtgaggccaatgacggtgc

SEQ ID NO: 2620 - DNA, 20 bp, Arachis hypogaea
  source 1..20: mol_type = other DNA
gtgctggccggcaccgtcat

SEQ ID NO: 2621 - DNA, 20 bp, Arachis hypogaea
  source 1..20: mol_type = other DNA
gatcgttgtgaggccaatga

SEQ ID NO: 2622 - DNA, 20 bp, Arachis hypogaea
  source 1..20: mol_type = other DNA
agagcggtgtgatcgttgtg

SEQ ID NO: 2623 - DNA, 20 bp, Arachis hypogaea
  source 1..20: mol_type = other DNA
gggctgaagatcacgaagag

SEQ ID NO: 2624 - DNA, 20 bp, Arachis hypogaea
  source 1..20: mol_type = other DNA
gctcttcgtgatcttcagcc

SEQ ID NO: 2625 - DNA, 20 bp, Arachis hypogaea
  source 1..20: mol_type = other DNA
tgacagctggcacaagcacc

SEQ ID NO: 2626 - DNA, 20 bp, Arachis hypogaea
  source 1..20: mol_type = other DNA
atgacagctggcacaagcac

SEQ ID NO: 2627 - DNA, 20 bp, Arachis hypogaea
  source 1..20: mol_type = other DNA
agtgccacagtgatgacagc

SEQ ID NO: 2628 - DNA, 20 bp, Arachis hypogaea
  source 1..20: mol_type = other DNA
tgtgccagctgtcatcactg

SEQ ID NO: 2629 - DNA, 20 bp, Arachis hypogaea
  source 1..20: mol_type = other DNA
gtcatcactgtggcactctt

SEQ ID NO: 2630 - DNA, 20 bp, Arachis hypogaea
  source 1..20: mol_type = other DNA
cactgtggcactcttaggct

SEQ ID NO: 2631 - DNA, 20 bp, Arachis hypogaea
  source 1..20: mol_type = other DNA
actgtggcactcttaggctt

SEQ ID NO: 2632 - DNA, 20 bp, Arachis hypogaea
  source 1..20: mol_type = other DNA
ctgtggcactcttaggcttg

SEQ ID NO: 2633 - DNA, 20 bp, Arachis hypogaea
  source 1..20: mol_type = other DNA
actcttaggcttggggttct

SEQ ID NO: 2634 - DNA, 20 bp, Arachis hypogaea
  source 1..20: mol_type = other DNA
ggcttggggttcttggcctc

SEQ ID NO: 2635 - DNA, 20 bp, Arachis hypogaea
  source 1..20: mol_type = other DNA
ttggggttcttggcctctgg

SEQ ID NO: 2636 - DNA, 20 bp, Arachis hypogaea
  source 1..20: mol_type = other DNA
cgccacgccgaagcctccag

SEQ ID NO: 2637 - DNA, 20 bp, Arachis hypogaea
  source 1..20: mol_type = other DNA
ttcttggcctctggaggctt

SEQ ID NO: 2638 - DNA, 20 bp, Arachis hypogaea
  source 1..20: mol_type = other DNA
ggcctctggaggcttcggcg

SEQ ID NO: 2639 - DNA, 20 bp, Arachis hypogaea
  source 1..20: mol_type = other DNA
ctctggaggcttcggcgtgg

SEQ ID NO: 2640 - DNA, 20 bp, Arachis hypogaea
  source 1..20: mol_type = other DNA
cggcaataacagtgctgacg

SEQ ID NO: 2641 - DNA, 20 bp, Arachis hypogaea
  source 1..20: mol_type = other DNA
cagtgctgacgtggatctat

SEQ ID NO: 2642 - DNA, 20 bp, Arachis hypogaea
  source 1..20: mol_type = other DNA
tggatctataggtacgtaac

SEQ ID NO: 2643 - DNA, 20 bp, Arachis hypogaea
  source 1..20: mol_type = other DNA
gtaacaggtaagcatccacc

SEQ ID NO: 2644 - DNA, 20 bp, Arachis hypogaea
  source 1..20: mol_type = other DNA
tccaattggttggcgccagg

SEQ ID NO: 2645 - DNA, 20 bp, Arachis hypogaea
  source 1..20: mol_type = other DNA
gtgtccaattggttggcgcc

SEQ ID NO: 2646 - DNA, 20 bp, Arachis hypogaea
  source 1..20: mol_type = other DNA
tccacctggcgccaaccaat

SEQ ID NO: 2647 - DNA, 20 bp, Arachis hypogaea
  source 1..20: mol_type = other DNA
gcgggctgtgtccaattggt

SEQ ID NO: 2648 - DNA, 20 bp, Arachis hypogaea
  source 1..20: mol_type = other DNA
tgtggcgggctgtgtccaat

SEQ ID NO: 2649 - DNA, 20 bp, Arachis hypogaea
  source 1..20: mol_type = other DNA
cttgcccatcagcttgtggc

SEQ ID NO: 2650 - DNA, 20 bp, Arachis hypogaea
  source 1..20: mol_type = other DNA
ccttgcccatcagcttgtgg

SEQ ID NO: 2651 - DNA, 20 bp, Arachis hypogaea
  source 1..20: mol_type = other DNA
gcgccttgcccatcagcttg

SEQ ID NO: 2652 - DNA, 20 bp, Arachis hypogaea
  source 1..20: mol_type = other DNA
cacagcccgccacaagctga

SEQ ID NO: 2653 - DNA, 20 bp, Arachis hypogaea
  source 1..20: mol_type = other DNA
acagcccgccacaagctgat

SEQ ID NO: 2654 - DNA, 20 bp, Arachis hypogaea
  source 1..20: mol_type = other DNA
ccgccacaagctgatgggca

SEQ ID NO: 2655 - DNA, 20 bp, Arachis hypogaea
  source 1..20: mol_type = other DNA
gggcaaggcgcgtgagatta

SEQ ID NO: 2656 - DNA, 20 bp, Arachis hypogaea
  source 1..20: mol_type = other DNA
gcgcgtgagattaaggactt

SEQ ID NO: 2657 - DNA, 20 bp, Arachis hypogaea
  source 1..20: mol_type = other DNA
tttggtcaacaacaaaccag

SEQ ID NO: 2658 - DNA, 20 bp, Arachis hypogaea
  source 1..20: mol_type = other DNA
ttggtcaacaacaaaccagt

SEQ ID NO: 2659 - DNA, 20 bp, Arachis hypogaea
  source 1..20: mol_type = other DNA
tggtcaacaacaaaccagtg

SEQ ID NO: 2660 - DNA, 20 bp, Arachis hypogaea
  source 1..20: mol_type = other DNA
tcaagaagcctgggccccac

SEQ ID NO: 2661 - DNA, 20 bp, Arachis hypogaea
  source 1..20: mol_type = other DNA
acaacaaaccagtggggccc

SEQ ID NO: 2662 - DNA, 20 bp, Arachis hypogaea
  source 1..20: mol_type = other DNA
atggtatgctcaagaagcct

SEQ ID NO: 2663 - DNA, 20 bp, Arachis hypogaea
  source 1..20: mol_type = other DNA
gatggtatgctcaagaagcc

SEQ ID NO: 2664 - DNA, 20 bp, Arachis hypogaea
  source 1..20: mol_type = other DNA
aacaaagatgcaaacgaaga

SEQ ID NO: 2665 - DNA, 3917 bp, Arachis hypogaea
  source 1..3917: mol_type = genomic DNA
tttttttttgaaaaaaaaattaatagtagtaaattatgaaatatggtttaatttattttagttatgaatattgcaaaaaatagattaaaaataaaataaaagataatttttttgttaattgtcttttgatttattttaaaaaaaattactaaaaaaattaatatatacaaattttattatcgataaattttataatataaaaaattaatgtatattattctattaacaaaaaatatatacatatttttatattttaaaatatatttacagatatatttttataataatcttacattaataatttatttgtatatattttttaaataatatatattatattaatcttttgtaataatatttttgaattcatctttaattacgtctatatgaacaattttgtaaaaaaaaaaaggttggtgattagaaagaaatcacatttaaaatcataaattccaatagatcatttctctaattcttaataagcctccacgctcagacatacaggtgtataatacataatcacgacgaagagaaatttttttataatatacaacaagtatcacattcataaacttattagcatgaacactcacgtaaaagttttttacaaacagtggttaaataaaaatttaattatatattaaattatataataattttattatatattaatttttaattaacagctcatgtaaaaataataagtgaatactctattttattcttgataattatgttaaaaggacaacgaaatttctaaaaaatcacattcaatccggttttttatttttttgtattgattaggtcatgtgccaaaaaaaatattaacttttttagtacaaggattaattagtctcataaaaataaaatttaaaaatcgaattagtatttttttttgtgaattttattattttttgaaataattgtcaggaacagttttaaatttttttaaaaaataattgtggaggaatttttaccatttattatagacataaaagaaaagaactactcttctatacatgctagttttctttgtccataattaaccttacgttatctaacctagcaaatgatgaactcggagacaccataagagtcccatatataatttataattttatttatattgacacattttgcatgcaatgatacgcagatccaagcagaaaagagcacctgtttccttgtaatgcgaacaacacaacaattttgcagagcataacaacactaatgtgtcaaaaaaaaaaaaaacacctccattcaacaagaaaaggccacagccaaacccaagtttcaaaatttgattttcctatctatttaataatcattaatttaatttccctttgcaggacatacatccgataaaaaataattaagttatacaaaaatatttaacttaattaataatatgtattacttttataaattttataattaaatataaataaatatccaattgttggataacttaatataaaaaatttatacattaattataaatgatccccgtttaacctctccataactatgatcttcactttaaactagtctattgactatattccttgtagatttgagttcttcaagctatttggatatatttaatcctgtaattttaaaaaagaagggaaaatttagtcacagtcgttgctaaaaccaaataaattgactttatggtgacaaagatgaaaacataggtatattttccacaatttatcaatgcatatatatttttgtaaatgcctttgtaatagcaaaacttttaacacacatcttatatcttcttaaaataaacacgtttaaataaataaataaataagtgtattatatagaaaaagcatatgcccaatccattaaatatgaatattagagtttagattccgcatctttttacttcttccaacatctctatgtaaaaatgaaaaaatcaatctaagtgtataactgttaatttatatatatacataatattattagaaaatataaaaacttaaattattagataaaattatgtaaataattatatgttactttttgttgtttaatttttttgtgataactaaaattaaactttatcattttagttataaaaattttgatattatataataaaattatttatcttaaaaatttaaactaaaatagaaagacaaatatttataaatttaaatagttcttacacaattttgttagcatgatacgatgttgggctttttatgaaaaataacataaaataaaataaaggcattttcaaatacttatagtttaatataaataaaaatttatatacaattatttttatatgaaattataattaaaaattattaaataataattaaattaaatatatttaattatttaataatttttaattaacaaataatttatataaaaaaaactgcatagcaatcttcgccttccatttttgtgcattttatgaagggaagaaaataatgtaagtgttactttcttaaacataggaacataatgaaacgattgaaaggtgctcttcctcatcatgaaaatcctttatccttctaataaacgaaagatgttacttattttttaaaaatttagtatttgatcaattttttaaaaatttattattatttaattaatttaaatatttatttttacgtattaattatttaaaaataaaaaatattttttatttttttaaaattaaataaaaattaatatttaaaaataataaaaatttaattataattaattttatataaaattaataattaaaaattaataattaaaaaaattcgttaaataaaaatttaattaaattatttaaattaattaacaaatctcaagtatcaacctcacttaaaattaaatccaactttcaccttaaaaaatatctagttacactgttaataaattactaggcaccggcatgcatgtcacaagcacgtgtcaacatctacaagtccaccgttctccaaacccaccacctcatcaaactcatccacaagcaccgatatcaatgtcttcccactctccattattaatcttcaaaaacctaaggaagaaaagagaacaaaaggaatcccaaaaagggccttttcttttctcttaacaatcaaacaacagcaatggctactgctactgatcgtgcacctcaccaggttcaagttcacacccccaccacacaacgcgtcgacgttccacgccgcggctacgatgttagtggtggtggtattaagactcttctccccgagagaggtccgtccacctctcaaatcatcgccgtcctcgtcggcgtccccactgggggcactctgttgctcctctccggcctttcacttctcggaaccataatcgggctggcaattgccaccccggtttttatcttcttcagcccggttatagttcccgcggtcgttaccattggacttgcagtcactggtattctcacggcgggagcatgtggactaaccgggctgatgtctttgtcatggatgattaacttcatccgacaggtacatgggacgacggtgccggatcagctggactcagtgaagcggcgcatggcggacatggcggattacgtggggcagaagacaaaggatgctggccaagagatacagactaaggcccaggatgttaagaggtcatcatcataaagtaaaaaaaaaaaagaaagaaagaaaaaaaaaaggaacgggtttgaatttgaatttagggttgatcgattatgttggaaaaaaaataatagttattatgcatgtatgtaccttttggtacttttgaatttggaggtctcattttgtgttttggtctttgttaactaatttgtgctatgtttgtgttttatgttaattaataagtgttctagatatcttgttttgttacatttgtatttgttccacttattattatattatattcaatgtgttcaacaa

SEQ ID NO: 2666 - protein, 176 aa, Arachis hypogaea
MATATDRAPHQVQVHTPTTQRVDVPRRGYDVSGGGIKTLLPERGPSTSQIIAVLVGVPTGGTLLLLSGLSLLGTIIGLAIATPVFIFFSPVIVPAVVTIGLAVTGILTAGACGLTGLMSLSWMINFIRQVHGTTVPDQLDSVKRRMADMADYVGQKTKDAGQEIQTKAQDVKRSSS

SEQ ID NO: 2667 - DNA, 20 bp, Arachis hypogaea
  source 1..20: mol_type = other DNA
tagtagtaaattatgaaata

SEQ ID NO: 2668 - DNA, 20 bp, Arachis hypogaea
  source 1..20: mol_type = other DNA
acaattttgtaaaaaaaaaa

SEQ ID NO: 2669 - DNA, 20 bp, Arachis hypogaea
  source 1..20: mol_type = other DNA
ttttgtaaaaaaaaaaaggt

SEQ ID NO: 2670 - DNA, 20 bp, Arachis hypogaea
  source 1..20: mol_type = other DNA
gaattagagaaatgatctat

SEQ ID NO: 2671 - DNA, 20 bp, Arachis hypogaea
  source 1..20: mol_type = other DNA
acctgtatgtctgagcgtgg

SEQ ID NO: 2672 - DNA, 20 bp, Arachis hypogaea
  source 1..20: mol_type = other DNA
tacacctgtatgtctgagcg

SEQ ID NO: 2673 - DNA, 20 bp, Arachis hypogaea
  source 1..20: mol_type = other DNA
gcctccacgctcagacatac

SEQ ID NO: 2674 - DNA, 20 bp, Arachis hypogaea
  source 1..20: mol_type = other DNA
taaaagttttttacaaacag

SEQ ID NO: 2675 - DNA, 20 bp, Arachis hypogaea
  source 1..20: mol_type = other DNA
ttcttgataattatgttaaa

SEQ ID NO: 2676 - DNA, 20 bp, Arachis hypogaea
  source 1..20: mol_type = other DNA
ctaaaaaatcacattcaatc

SEQ ID NO: 2677 - DNA, 20 bp, Arachis hypogaea
  source 1..20: mol_type = other DNA
aatacaaaaaaataaaaaac

SEQ ID NO: 2678 - DNA, 20 bp, Arachis hypogaea
  source 1..20: mol_type = other DNA
tttatttttttgtattgatt

SEQ ID NO: 2679 - DNA, 20 bp, Arachis hypogaea
  source 1..20: mol_type = other DNA
aaaaaagttaatattttttt

SEQ ID NO: 2680 - DNA, 20 bp, Arachis hypogaea
  source 1..20: mol_type = other DNA
atattaacttttttagtaca

SEQ ID NO: 2681 - DNA, 20 bp, Arachis hypogaea
  source 1..20: mol_type = other DNA
tattttttgaaataattgtc

SEQ ID NO: 2682 - DNA, 20 bp, Arachis hypogaea
  source 1..20: mol_type = other DNA
atttttttaaaaaataattg

SEQ ID NO: 2683 - DNA, 20 bp, Arachis hypogaea
  source 1..20: mol_type = other DNA
tttttaaaaaataattgtgg

SEQ ID NO: 2684 - DNA, 20 bp, Arachis hypogaea
  source 1..20: mol_type = other DNA
tcttttatgtctataataaa

SEQ ID NO: 2685 - DNA, 20 bp, Arachis hypogaea
  source 1..20: mol_type = other DNA
agataacgtaaggttaatta

SEQ ID NO: 2686 - DNA, 20 bp, Arachis hypogaea
  source 1..20: mol_type = other DNA
ttgctaggttagataacgta

SEQ ID NO: 2687 - DNA, 20 bp, Arachis hypogaea
  source 1..20: mol_type = other DNA
ctccgagttcatcatttgct

SEQ ID NO: 2688 - DNA, 20 bp, Arachis hypogaea
  source 1..20: mol_type = other DNA
aacctagcaaatgatgaact

SEQ ID NO: 2689 - DNA, 20 bp, Arachis hypogaea
  source 1..20: mol_type = other DNA
aattatatatgggactctta

SEQ ID NO: 2690 - DNA, 20 bp, Arachis hypogaea
  source 1..20: mol_type = other DNA
taaaattataaattatatat

SEQ ID NO: 2691 - DNA, 20 bp, Arachis hypogaea
  source 1..20: mol_type = other DNA
ataaaattataaattatata

SEQ ID NO: 2692 - DNA, 20 bp, Arachis hypogaea
  source 1..20: mol_type = other DNA
aacaggtgctcttttctgct

SEQ ID NO: 2693 - DNA, 20 bp, Arachis hypogaea
  source 1..20: mol_type = other DNA
tgttcgcattacaaggaaac

SEQ ID NO: 2694 - DNA, 20 bp, Arachis hypogaea
  source 1..20: mol_type = other DNA
gttgtgttgttcgcattaca

SEQ ID NO: 2695 - DNA, 20 bp, Arachis hypogaea
  source 1..20: mol_type = other DNA
ggccttttcttgttgaatgg

SEQ ID NO: 2696 - DNA, 20 bp, Arachis hypogaea
  source 1..20: mol_type = other DNA
tgtggccttttcttgttgaa

SEQ ID NO: 2697 - DNA, 20 bp, Arachis hypogaea
  source 1..20: mol_type = other DNA
cacctccattcaacaagaaa

SEQ ID NO: 2698 - DNA, 20 bp, Arachis hypogaea
  source 1..20: mol_type = other DNA
ttgaaacttgggtttggctg

SEQ ID NO: 2699 - DNA, 20 bp, Arachis hypogaea
  source 1..20: mol_type = other DNA
caaattttgaaacttgggtt

SEQ ID NO: 2700 - DNA, 20 bp, Arachis hypogaea
  source 1..20: mol_type = other DNA
aaaatcaaattttgaaactt

SEQ ID NO: 2701 - DNA, 20 bp, Arachis hypogaea
  source 1..20: mol_type = other DNA
gaaaatcaaattttgaaact

SEQ ID NO: 2702 - DNA, 20 bp, Arachis hypogaea
  source 1..20: mol_type = other DNA
ttaatgattattaaatagat

SEQ ID NO: 2703 - DNA, 20 bp, Arachis hypogaea
  source 1..20: mol_type = other DNA
ttaatttaatttccctttgc

SEQ ID NO: 2704 - DNA, 20 bp, Arachis hypogaea
  source 1..20: mol_type = other DNA
tcggatgtatgtcctgcaaa

SEQ ID NO: 2705 - DNA, 20 bp, Arachis hypogaea
  source 1..20: mol_type = other DNA
atcggatgtatgtcctgcaa

SEQ ID NO: 2706 - DNA, 20 bp, Arachis hypogaea
  source 1..20: mol_type = other DNA
ataacttaattattttttat

SEQ ID NO: 2707 - DNA, 20 bp, Arachis hypogaea
  source 1..20: mol_type = other DNA
ataaataaatatccaattgt

SEQ ID NO: 2708 - DNA, 20 bp, Arachis hypogaea
  source 1..20: mol_type = other DNA
atattaagttatccaacaat

SEQ ID NO: 2709 - DNA, 20 bp, Arachis hypogaea
  source 1..20: mol_type = other DNA
agttatggagaggttaaacg

SEQ ID NO: 2710 - DNA, 20 bp, Arachis hypogaea
  source 1..20: mol_type = other DNA
tagttatggagaggttaaac

SEQ ID NO: 2711 - DNA, 20 bp, Arachis hypogaea
  source 1..20: mol_type = other DNA
atagttatggagaggttaaa

SEQ ID NO: 2712 - DNA, 20 bp, Arachis hypogaea
  source 1..20: mol_type = other DNA
tgaagatcatagttatggag

SEQ ID NO: 2713 - DNA, 20 bp, Arachis hypogaea
  source 1..20: mol_type = other DNA
taaagtgaagatcatagtta

SEQ ID NO: 2714 - DNA, 20 bp, Arachis hypogaea
  source 1..20: mol_type = other DNA
ttgaagaactcaaatctaca

SEQ ID NO: 2715 - DNA, 20 bp, Arachis hypogaea
  source 1..20: mol_type = other DNA
tttgagttcttcaagctatt

SEQ ID NO: 2716 - DNA, 20 bp, Arachis hypogaea
  source 1..20: mol_type = other DNA
cccttcttttttaaaattac

SEQ ID NO: 2717 - DNA, 20 bp, Arachis hypogaea
  source 1..20: mol_type = other DNA
tcctgtaattttaaaaaaga

SEQ ID NO: 2718 - DNA, 20 bp, Arachis hypogaea
  source 1..20: mol_type = other DNA
cctgtaattttaaaaaagaa

SEQ ID NO: 2719 - DNA, 20 bp, Arachis hypogaea
  source 1..20: mol_type = other DNA
caccataaagtcaatttatt

SEQ ID NO: 2720 - DNA, 20 bp, Arachis hypogaea
  source 1..20: mol_type = other DNA
aaccaaataaattgacttta

SEQ ID NO: 2721 - DNA, 20 bp, Arachis hypogaea
  source 1..20: mol_type = other DNA
ggtgacaaagatgaaaacat

SEQ ID NO: 2722 - DNA, 20 bp, Arachis hypogaea
  source 1..20: mol_type = other DNA
atatatgcattgataaattg

SEQ ID NO: 2723 - DNA, 20 bp, Arachis hypogaea
  source 1..20: mol_type = other DNA
taaaagttttgctattacaa

SEQ ID NO: 2724 - DNA, 20 bp, Arachis hypogaea
  source 1..20: mol_type = other DNA
atattcatatttaatggatt

SEQ ID NO: 2725 - DNA, 20 bp, Arachis hypogaea
  source 1..20: mol_type = other DNA
aatattcatatttaatggat

SEQ ID NO: 2726 - DNA, 20 bp, Arachis hypogaea
  source 1..20: mol_type = other DNA
actctaatattcatatttaa

SEQ ID NO: 2727 - DNA, 20 bp, Arachis hypogaea
  source 1..20: mol_type = other DNA
ttggaagaagtaaaaagatg

SEQ ID NO: 2728 - DNA, 20 bp, Arachis hypogaea
  source 1..20: mol_type = other DNA
tcatttttacatagagatgt

SEQ ID NO: 2729 - DNA, 20 bp, Arachis hypogaea
  source 1..20: mol_type = other DNA
ttgttagcatgatacgatgt

SEQ ID NO: 2730 - DNA, 20 bp, Arachis hypogaea
  source 1..20: mol_type = other DNA
tgttagcatgatacgatgtt

SEQ ID NO: 2731 - DNA, 20 bp, Arachis hypogaea
  source 1..20: mol_type = other DNA
aataacataaaataaaataa

SEQ ID NO: 2732 - DNA, 20 bp, Arachis hypogaea
  source 1..20: mol_type = other DNA
ataaaatgcacaaaaatgga

SEQ ID NO: 2733 - DNA, 20 bp, Arachis hypogaea
  source 1..20: mol_type = other DNA
cttcataaaatgcacaaaaa

SEQ ID NO: 2734 - DNA, 20 bp, Arachis hypogaea
  source 1..20: mol_type = other DNA
catttttgtgcattttatga

SEQ ID NO: 2735 - DNA, 20 bp, Arachis hypogaea
  source 1..20: mol_type = other DNA
atttttgtgcattttatgaa

SEQ ID NO: 2736 - DNA, 20 bp, Arachis hypogaea
  source 1..20: mol_type = other DNA
agtgttactttcttaaacat

SEQ ID NO: 2737 - DNA, 20 bp, Arachis hypogaea
  source 1..20: mol_type = other DNA
aacataatgaaacgattgaa

SEQ ID NO: 2738 - DNA, 20 bp, Arachis hypogaea
  source 1..20: mol_type = other DNA
gataaaggattttcatgatg

SEQ ID NO: 2739 - DNA, 20 bp, Arachis hypogaea
  source 1..20: mol_type = other DNA
ttcgtttattagaaggataa

SEQ ID NO: 2740 - DNA, 20 bp, Arachis hypogaea
  source 1..20: mol_type = other DNA
aacatctttcgtttattaga

SEQ ID NO: 2741 - DNA, 20 bp, Arachis hypogaea
  source 1..20: mol_type = other DNA
gttggatttaattttaagtg

SEQ ID NO: 2742 - DNA, 20 bp, Arachis hypogaea
  source 1..20: mol_type = other DNA
atattttttaaggtgaaagt

SEQ ID NO: 2743 - DNA, 20 bp, Arachis hypogaea
  source 1..20: mol_type = other DNA
gtgtaactagatatttttta

SEQ ID NO: 2744 - DNA, 20 bp, Arachis hypogaea
  source 1..20: mol_type = other DNA
tacactgttaataaattact

SEQ ID NO: 2745 - DNA, 20 bp, Arachis hypogaea
  source 1..20: mol_type = other DNA
gttaataaattactaggcac

SEQ ID NO: 2746 - DNA, 20 bp, Arachis hypogaea
  source 1..20: mol_type = other DNA
cgtgcttgtgacatgcatgc

SEQ ID NO: 2747 - DNA, 20 bp, Arachis hypogaea
  source 1..20: mol_type = other DNA
gtggtgggtttggagaacgg

SEQ ID NO: 2748 - DNA, 20 bp, Arachis hypogaea
  source 1..20: mol_type = other DNA
gaggtggtgggtttggagaa

SEQ ID NO: 2749 - DNA, 20 bp, Arachis hypogaea
  source 1..20: mol_type = other DNA
gtttgatgaggtggtgggtt

SEQ ID NO: 2750 - DNA, 20 bp, Arachis hypogaea
  source 1..20: mol_type = other DNA
gatgagtttgatgaggtggt

SEQ ID NO: 2751 - DNA, 20 bp, Arachis hypogaea
  source 1..20: mol_type = other DNA
ggatgagtttgatgaggtgg

SEQ ID NO: 2752 - DNA, 20 bp, Arachis hypogaea
  source 1..20: mol_type = other DNA
tgtggatgagtttgatgagg

SEQ ID NO: 2753 - DNA, 20 bp, Arachis hypogaea
  source 1..20: mol_type = other DNA
gcttgtggatgagtttgatg

SEQ ID NO: 2754 - DNA, 20 bp, Arachis hypogaea
  source 1..20: mol_type = other DNA
gacattgatatcggtgcttg

SEQ ID NO: 2755 - DNA, 20 bp, Arachis hypogaea
  source 1..20: mol_type = other DNA
gagtgggaagacattgatat

SEQ ID NO: 2756 - DNA, 20 bp, Arachis hypogaea
  source 1..20: mol_type = other DNA
gaagattaataatggagagt

SEQ ID NO: 2757 - DNA, 20 bp, Arachis hypogaea
  source 1..20: mol_type = other DNA
tgaagattaataatggagag

SEQ ID NO: 2758 - DNA, 20 bp, Arachis hypogaea
  source 1..20: mol_type = other DNA
aggtttttgaagattaataa

SEQ ID NO: 2759 - DNA, 20 bp, Arachis hypogaea
  source 1..20: mol_type = other DNA
tattaatcttcaaaaaccta

SEQ ID NO: 2760 - DNA, 20 bp, Arachis hypogaea
  source 1..20: mol_type = other DNA
tttgttctcttttcttcctt

SEQ ID NO: 2761 - DNA, 20 bp, Arachis hypogaea
  source 1..20: mol_type = other DNA
aaggaagaaaagagaacaaa

SEQ ID NO: 2762 - DNA, 20 bp, Arachis hypogaea
  source 1..20: mol_type = other DNA
gaacaaaaggaatcccaaaa

SEQ ID NO: 2763 - DNA, 20 bp, Arachis hypogaea
  source 1..20: mol_type = other DNA
aacaaaaggaatcccaaaaa

SEQ ID NO: 2764 - DNA, 20 bp, Arachis hypogaea
  source 1..20: mol_type = other DNA
gaaaagaaaaggcccttttt

SEQ ID NO: 2765 - DNA, 20 bp, Arachis hypogaea
  source 1..20: mol_type = other DNA
agaaaagaaaaggccctttt

SEQ ID NO: 2766 - DNA, 20 bp, Arachis hypogaea
  source 1..20: mol_type = other DNA
gattgttaagagaaaagaaa

SEQ ID NO: 2767 - DNA, 20 bp, Arachis hypogaea
  source 1..20: mol_type = other DNA
taacaatcaaacaacagcaa

SEQ ID NO: 2768 - DNA, 20 bp, Arachis hypogaea
  source 1..20: mol_type = other DNA
tactgatcgtgcacctcacc

SEQ ID NO: 2769 - DNA, 20 bp, Arachis hypogaea
  source 1..20: mol_type = other DNA
gtgtgaacttgaacctggtg

SEQ ID NO: 2770 - DNA, 20 bp, Arachis hypogaea
  source 1..20: mol_type = other DNA
tgggggtgtgaacttgaacc

SEQ ID NO: 2771 - DNA, 20 bp, Arachis hypogaea
  source 1..20: mol_type = other DNA
gtcgacgcgttgtgtggtgg

SEQ ID NO: 2772 - DNA, 20 bp, Arachis hypogaea
  source 1..20: mol_type = other DNA
cgtcgacgcgttgtgtggtg

SEQ ID NO: 2773 - DNA, 20 bp, Arachis hypogaea
  source 1..20: mol_type = other DNA
acgtcgacgcgttgtgtggt

SEQ ID NO: 2774 - DNA, 20 bp, Arachis hypogaea
  source 1..20: mol_type = other DNA
aacgtcgacgcgttgtgtgg

SEQ ID NO: 2775 - DNA, 20 bp, Arachis hypogaea
  source 1..20: mol_type = other DNA
tggaacgtcgacgcgttgtg

SEQ ID NO: 2776 - DNA, 20 bp, Arachis hypogaea
  source 1..20: mol_type = other DNA
cgcgtcgacgttccacgccg

SEQ ID NO: 2777 - DNA, 20 bp, Arachis hypogaea
  source 1..20: mol_type = other DNA
ctaacatcgtagccgcggcg

SEQ ID NO: 2778 - DNA, 20 bp, Arachis hypogaea
  source 1..20: mol_type = other DNA
caccactaacatcgtagccg

SEQ ID NO: 2779 - DNA, 20 bp, Arachis hypogaea
  source 1..20: mol_type = other DNA
cgccgcggctacgatgttag

SEQ ID NO: 2780 - DNA, 20 bp, Arachis hypogaea
  source 1..20: mol_type = other DNA
cgcggctacgatgttagtgg

SEQ ID NO: 2781 - DNA, 20 bp, Arachis hypogaea
  source 1..20: mol_type = other DNA
ggctacgatgttagtggtgg

SEQ ID NO: 2782 - DNA, 20 bp, Arachis hypogaea
  source 1..20: mol_type = other DNA
aagactcttctccccgagag

SEQ ID NO: 2783 - DNA, 20 bp, Arachis hypogaea
  source 1..20: mol_type = other DNA
aggtggacggacctctctcg

SEQ ID NO: 2784 - DNA, 20 bp, Arachis hypogaea
  source 1..20: mol_type = other DNA
gaggtggacggacctctctc

SEQ ID NO: 2785 - DNA, 20 bp, Arachis hypogaea
  source 1..20: mol_type = other DNA
agaggtggacggacctctct

SEQ ID NO: 2786 - DNA, 20 bp, Arachis hypogaea
  source 1..20: mol_type = other DNA
gcgatgatttgagaggtgga

SEQ ID NO: 2787 - DNA, 20 bp, Arachis hypogaea
  source 1..20: mol_type = other DNA
gacggcgatgatttgagagg

SEQ ID NO: 2788 - DNA, 20 bp, Arachis hypogaea
  source 1..20: mol_type = other DNA
gaggacggcgatgatttgag

SEQ ID NO: 2789 - DNA, 20 bp, Arachis hypogaea
  source 1..20: mol_type = other DNA
agtggggacgccgacgagga

SEQ ID NO: 2790 - DNA, 20 bp, Arachis hypogaea
  source 1..20: mol_type = other DNA
caaatcatcgccgtcctcgt

SEQ ID NO: 2791 - DNA, 20 bp, Arachis hypogaea
  source 1..20: mol_type = other DNA
ccccagtggggacgccgacg

SEQ ID NO: 2792 - DNA, 20 bp, Arachis hypogaea
  source 1..20: mol_type = other DNA
gtcctcgtcggcgtccccac

SEQ ID NO: 2793 - DNA, 20 bp, Arachis hypogaea
  source 1..20: mol_type = other DNA
tcctcgtcggcgtccccact

SEQ ID NO: 2794 - DNA, 20 bp, Arachis hypogaea
  source 1..20: mol_type = other DNA
cctcgtcggcgtccccactg

SEQ ID NO: 2795 - DNA, 20 bp, Arachis hypogaea
  source 1..20: mol_type = other DNA
ctcgtcggcgtccccactgg

SEQ ID NO: 2796 - DNA, 20 bp, Arachis hypogaea
  source 1..20: mol_type = other DNA
gcaacagagtgcccccagtg

SEQ ID NO: 2797 - DNA, 20 bp, Arachis hypogaea
  source 1..20: mol_type = other DNA
agcaacagagtgcccccagt

SEQ ID NO: 2798 - DNA, 20 bp, Arachis hypogaea
  source 1..20: mol_type = other DNA
gagcaacagagtgcccccag

SEQ ID NO: 2799 - DNA, 20 bp, Arachis hypogaea
  source 1..20: mol_type = other DNA
ggcactctgttgctcctctc

SEQ ID NO: 2800 - DNA, 20 bp, Arachis hypogaea
  source 1..20: mol_type = other DNA
cgagaagtgaaaggccggag

SEQ ID NO: 2801 - DNA, 20 bp, Arachis hypogaea
  source 1..20: mol_type = other DNA
ggttccgagaagtgaaaggc

SEQ ID NO: 2802 - DNA, 20 bp, Arachis hypogaea
  source 1..20: mol_type = other DNA
ttatggttccgagaagtgaa

SEQ ID NO: 2803 - DNA, 20 bp, Arachis hypogaea
  source 1..20: mol_type = other DNA
ctctccggcctttcacttct

SEQ ID NO: 2804 - DNA, 20 bp, Arachis hypogaea
  source 1..20: mol_type = other DNA
tcacttctcggaaccataat

SEQ ID NO: 2805 - DNA, 20 bp, Arachis hypogaea
  source 1..20: mol_type = other DNA
cacttctcggaaccataatc

SEQ ID NO: 2806 - DNA, 20 bp, Arachis hypogaea
  source 1..20: mol_type = other DNA
ggcaattgccagcccgatta

SEQ ID NO: 2807 - DNA, 20 bp, Arachis hypogaea
  source 1..20: mol_type = other DNA
tctcggaaccataatcgggc

SEQ ID NO: 2808 - DNA, 20 bp, Arachis hypogaea
  source 1..20: mol_type = other DNA
cgggctggcaattgccaccc

SEQ ID NO: 2809 - DNA, 20 bp, Arachis hypogaea
  source 1..20: mol_type = other DNA
gaagaagataaaaaccgggg

SEQ ID NO: 2810 - DNA, 20 bp, Arachis hypogaea
  source 1..20: mol_type = other DNA
gctgaagaagataaaaaccg

SEQ ID NO: 2811 - DNA, 20 bp, Arachis hypogaea
  source 1..20: mol_type = other DNA
ggctgaagaagataaaaacc

SEQ ID NO: 2812 - DNA, 20 bp, Arachis hypogaea
  source 1..20: mol_type = other DNA
gggctgaagaagataaaaac

SEQ ID NO: 2813 - DNA, 20 bp, Arachis hypogaea
  source 1..20: mol_type = other DNA
ggtttttatcttcttcagcc

SEQ ID NO: 2814 - DNA, 20 bp, Arachis hypogaea
  source 1..20: mol_type = other DNA
cgaccgcgggaactataacc

SEQ ID NO: 2815 - DNA, 20 bp, Arachis hypogaea
  source 1..20: mol_type = other DNA
acgaccgcgggaactataac

SEQ ID NO: 2816 - DNA, 20 bp, Arachis hypogaea
  source 1..20: mol_type = other DNA
cagcccggttatagttcccg

SEQ ID NO: 2817 - DNA, 20 bp, Arachis hypogaea
  source 1..20: mol_type = other DNA
agtccaatggtaacgaccgc

SEQ ID NO: 2818 - DNA, 20 bp, Arachis hypogaea
  source 1..20: mol_type = other DNA
aagtccaatggtaacgaccg

SEQ ID NO: 2819 - DNA, 20 bp, Arachis hypogaea
  source 1..20: mol_type = other DNA
gttcccgcggtcgttaccat

SEQ ID NO: 2820 - DNA, 20 bp, Arachis hypogaea
  source 1..20: mol_type = other DNA
accagtgactgcaagtccaa

SEQ ID NO: 2821 - DNA, 20 bp, Arachis hypogaea
  source 1..20: mol_type = other DNA
accattggacttgcagtcac

SEQ ID NO: 2822 - DNA, 20 bp, Arachis hypogaea
  source 1..20: mol_type = other DNA
tgcagtcactggtattctca

SEQ ID NO: 2823 - DNA, 20 bp, Arachis hypogaea
  source 1..20: mol_type = other DNA
agtcactggtattctcacgg

SEQ ID NO: 2824 - DNA, 20 bp, Arachis hypogaea
  source 1..20: mol_type = other DNA
gtcactggtattctcacggc

SEQ ID NO: 2825 - DNA, 20 bp, Arachis hypogaea
  source 1..20: mol_type = other DNA
attctcacggcgggagcatg

SEQ ID NO: 2826 - DNA, 20 bp, Arachis hypogaea
  source 1..20: mol_type = other DNA
gcgggagcatgtggactaac

SEQ ID NO: 2827 - DNA, 20 bp, Arachis hypogaea
  source 1..20: mol_type = other DNA
cgggagcatgtggactaacc

SEQ ID NO: 2828 - DNA, 20 bp, Arachis hypogaea
  source 1..20: mol_type = other DNA
ccatgacaaagacatcagcc

SEQ ID NO: 2829 - DNA, 20 bp, Arachis hypogaea
  source 1..20: mol_type = other DNA
ccgggctgatgtctttgtca

SEQ ID NO: 2830 - DNA, 20 bp, Arachis hypogaea
  source 1..20: mol_type = other DNA
gatgattaacttcatccgac

SEQ ID NO: 2831 - DNA, 20 bp, Arachis hypogaea
  source 1..20: mol_type = other DNA
ccgtcgtcccatgtacctgt

SEQ ID NO: 2832 - DNA, 20 bp, Arachis hypogaea
  source 1..20: mol_type = other DNA
aacttcatccgacaggtaca

SEQ ID NO: 2833 - DNA, 20 bp, Arachis hypogaea
  source 1..20: mol_type = other DNA
acttcatccgacaggtacat

SEQ ID NO: 2834 - DNA, 20 bp, Arachis hypogaea
  source 1..20: mol_type = other DNA
ccgacaggtacatgggacga

SEQ ID NO: 2835 - DNA, 20 bp, Arachis hypogaea
  source 1..20: mol_type = other DNA
ggtacatgggacgacggtgc

SEQ ID NO: 2836 - DNA, 20 bp, Arachis hypogaea
  source 1..20: mol_type = other DNA
ttcactgagtccagctgatc

SEQ ID NO: 2837 - DNA, 20 bp, Arachis hypogaea
  source 1..20: mol_type = other DNA
gacgacggtgccggatcagc

SEQ ID NO: 2838 - DNA, 20 bp, Arachis hypogaea
  source 1..20: mol_type = other DNA
atcagctggactcagtgaag

SEQ ID NO: 2839 - DNA, 20 bp, Arachis hypogaea
  source 1..20: mol_type = other DNA
ggactcagtgaagcggcgca

SEQ ID NO: 2840 - DNA, 20 bp, Arachis hypogaea
  source 1..20: mol_type = other DNA
ctcagtgaagcggcgcatgg

SEQ ID NO: 2841 - DNA, 20 bp, Arachis hypogaea
  source 1..20: mol_type = other DNA
gaagcggcgcatggcggaca

SEQ ID NO: 2842 - DNA, 20 bp, Arachis hypogaea
  source 1..20: mol_type = other DNA
gcggcgcatggcggacatgg

SEQ ID NO: 2843 - DNA, 20 bp, Arachis hypogaea
  source 1..20: mol_type = other DNA
ggcggacatggcggattacg

SEQ ID NO: 2844 - DNA, 20 bp, Arachis hypogaea
  source 1..20: mol_type = other DNA
gcggacatggcggattacgt

SEQ ID NO: 2845 - DNA, 20 bp, Arachis hypogaea
  source 1..20: mol_type = other DNA
cggacatggcggattacgtg

SEQ ID NO: 2846 - DNA, 20 bp, Arachis hypogaea
  source 1..20: mol_type = other DNA
ttacgtggggcagaagacaa

SEQ ID NO: 2847 - DNA, 20 bp, Arachis hypogaea
  source 1..20: mol_type = other DNA
gggcagaagacaaaggatgc

SEQ ID NO: 2848 - DNA, 20 bp, Arachis hypogaea
  source 1..20: mol_type = other DNA
gggccttagtctgtatctct

SEQ ID NO: 2849 - DNA, 20 bp, Arachis hypogaea
  source 1..20: mol_type = other DNA
tggccaagagatacagacta

SEQ ID NO: 2850 - DNA, 20 bp, Arachis hypogaea
  source 1..20: mol_type = other DNA
agagatacagactaaggccc

SEQ ID NO: 2851 - DNA, 20 bp, Arachis hypogaea
  source 1..20: mol_type = other DNA
tgatgacctcttaacatcct

SEQ ID NO: 2852 - DNA, 20 bp, Arachis hypogaea
  source 1..20: mol_type = other DNA
atgatgacctcttaacatcc

SEQ ID NO: 2853 - DNA, 20 bp, Arachis hypogaea
  source 1..20: mol_type = other DNA
ctaaggcccaggatgttaag

SEQ ID NO: 2854 - DNA, 4010 bp, Arachis hypogaea
  source 1..4010: mol_type = genomic DNA
aaaattggaaatacaatgtatcatcatttaatcatacaagacatgaaaataacttttcttttgtggaattgtctatggtggggaaagttggttctggtccttaaagcacctgattaaaatattcgaaatatgtggctagatatgacgccgtaccgttgaaaataattctactatgtttggccccagaatttatataattgcaaaccgggttaaagggaatgtggaaaatgagaacggtttagttgcaaaagaagttagccagagagtgattgggccgtattggaccttgtgacctaagcatgatataagaggtaatgctttttatatgtagctggactatttgtagattattattttttggtaaaatatttgtagattatttaagtcgacacatcagattaattaagtcgatccaccgtaaacaaaaaaaaagtaggtgagattgatatatttatttgtcttaatttaattattttttacttaataataattaataacaattgttatcctgaggatactaacaatataaatggtaatgataatagttagtattattattacaatcgtaataaaaaaaagaaatgatcataattatcagaaaaatgtgaataagaataatcgtagtgaatattaaaataataataataattcctaatataatactaataatagtaattacactaatataaatataaatagttgaagaatactactccttaggataagaagaaaaaagtctaaaaaattaaaattttaaaataatgactacatttatttagtgagaaaaaatttagtatataattaataattattttataaaattatttaaataaaaaaattttaacaaaaaataattatgtgaaggaaaattgaagtgaactaatgatattttttaatgaaaatgttatttttaaagaataaaaattttgaggagaactcatattttttttgcttcaaatttgtttctttgaaaaataatgacgatgacttgtcaacttagcttcaaccactataaacaatttaaaagaaagtcaaattatcagaagagaaaaaatatcaaattagtagcaattattttttttaatttgaagtaaaaaaaagttgaagtgagccaaataatatttttctaatttgaatcaattattgcttaaaaaatgaagagtaaagctaaccgaatttttttctccgtttgaacaaatattattttgaaaggaaaaaaaagttgtagtaaatgaattttgttgtaaaataattttttttagaaaggaaaaaaataggtgaatcaaggtttatagtaaaaaatatataaatgtttaaaaatattcataaaataatattatagaaactagaaagtcaattttaaggatgaaaatttttattattaaaagaaaagaaatgatgaaaagtaagaaatcataaaccaagacacttagttatcagaaatgtgcttcttttcattttaaaatatttatgaatcaagaactaaaatattcattaattataaatgtttcctggaccttaaaagtcctgaagatactttcaccgtggaagaagcctccttcttttgtctctccccttatctcaattctcaagcacaaaaagattcttctctgaagccaatattcccatgcaactttttttttaattattattacaattgtctcgatatttttttttaaattaaaaattaaattatctttttttttcatatattattttataatttttttaaaattttttaacacatgaaataattaaatatttaaccaattcaatacatagttaaagtttgaataaatttttcttttaaaacatatattctaaacttacacaaatatttcccaagctttataattttataagaataaaaacaatgcaattaaatttttaattaatttagacataatattttataatcaaataaaatatataaaattttttatgttaaatatttgtataattaagcttattataccataatataccaatgagtttactatttaatttcccaaaaatatcgaagtggtttttttatttgtaaaaatctaagatcccacatttaaacattttttttttattaaaaataggtaactttactcaaggtaaattctcttgtttatagattttataattttttttgggtaaatgtatatgaatatgagttattaatataattagtagtaaaatgttcagttacaattatctacatacattaatacaattagcagaaaaaaacttaattattaaaatttaattattttattaagtcttataattttattaaatttataattaaatttttatatttttttgtcttttagttaaattcttacattatttttaattttataattaattttactttgtgttaaaaatattaaaattaataaaaaatttctttcaaaatatatgtaattaaaaatctaattagattcttaattgtaattatttttaatttatgaaaaatattttattaattcttaacatttttagaataacaaaaatctaattacaaaataaaaaataatataaaatttaattaaaaaaataaaaatttaattacaaattggaaaaataaacaaataagtccctaatttttaatttaaaaaatacttaaattttttattaattgaaaataaaaaaataattctattttttttaaaataaaagatatttaaatctctctatctaaataaatcgatcttccaaaaaaatttaaatatctcgtattttaaaaagtgaaagatatttttatattttaaaataaaaaaaccaagaacctatttatggtttactcatcagagcaattaagccgttaattaattaatgttatgaatttttttcccaaatagacagttatttcaaagaaaaggagacacaactctattaaaaaatatcaaaattaccattattgaaagcatgccatggtccccagcagagaaagggtcctgtaacaatgtatggtgatcagtgttagaagacaccagtcagttaaagggacaggtgttgcatcacctccacctcagtttcatgcaaagccgccacgacacagcaatgcaccctccccttttgccagcttaacctcccttcattgctatatacattcccttcacttctctctcactcttcctcaaaccccatcacttcttgtctaaaaattctcaaaagtcaccagccaccaaaaacccatttaccattatgtctgatcaaacaaggacaggctatggaggaggagggtcctatggatcatcctatggtggaggaggcacctatggttcatcttatggaacctcctatgaccccagtactaaccaacctatacgccaagccatcaagttcatgacagcatcaaccattggtgtctcattcttgatcctgtctgggttgatcctcactggaactgtcataggtttgatcattgcaacaccacttcttgttatcttcagtcctatccttgtccctgctgccataacccttgcactggctgctggtggatttttgttctctggtggctgtggtgttgctgccattgctgcattgtcatggttgtacagctatgtcactgggaaacaccctgctggctctgataggcttgattatgctaaaggggtgattgctgataaggctagggatgttaaggacagggccaaggattatgctggtgctggtagggctcaggagggcacacaagggtattgatcatcattgtgatgaagaaaaatggaagctttgtgtgtatgtgtgggtgagtgaggttggaggtggtactcgaagtcataggcaccctttttgagatttgcatgttggagtttcatgtcacgttatcatgtttgtatcttgtgtccactgtccagtgttatattctgtatttgtcttttcactttttattgtatctttgttggtttctgaggatgaatctctcactttatttgtgtagtcatcatgttaataaatcagaactcttgtaagaatatttcctcgtcttaagatatgtgtttgattatttctta

SEQ ID NO: 2855 - protein, 154 aa, Arachis hypogaea
MSDQTRTGYGGGGSYGSSYGGGGTYGSSYGTSYDPSTNQPIRQAIKFMTASTIGVSFLILSGLILTGTVIGLIIATPLLVIFSPILVPAAITLALAAGGFLFSGGCGVAAIAALSWLYSYVTGKHPAGSDRLDYAKGVIADKARDVKDRAKDYA

SEQ ID NO: 2856 - DNA, 20 bp, Arachis hypogaea
  source 1..20: mol_type = other DNA
tgaaaataacttttcttttg

SEQ ID NO: 2857 - DNA, 20 bp, Arachis hypogaea
  source 1..20: mol_type = other DNA
ttcttttgtggaattgtcta

SEQ ID NO: 2858 - DNA, 20 bp, Arachis hypogaea
  source 1..20: mol_type = other DNA
ttttgtggaattgtctatgg

SEQ ID NO: 2859 - DNA, 20 bp, Arachis hypogaea
  source 1..20: mol_type = other DNA
tttgtggaattgtctatggt

SEQ ID NO: 2860 - DNA, 20 bp, Arachis hypogaea
  source 1..20: mol_type = other DNA
ttgtggaattgtctatggtg

SEQ ID NO: 2861 - DNA, 20 bp, Arachis hypogaea
  source 1..20: mol_type = other DNA
ttgtctatggtggggaaagt

SEQ ID NO: 2862 - DNA, 20 bp, Arachis hypogaea
  source 1..20: mol_type = other DNA
atggtggggaaagttggttc

SEQ ID NO: 2863 - DNA, 20 bp, Arachis hypogaea
  source 1..20: mol_type = other DNA
tattttaatcaggtgcttta

SEQ ID NO: 2864 - DNA, 20 bp, Arachis hypogaea
  source 1..20: mol_type = other DNA
atatttcgaatattttaatc

SEQ ID NO: 2865 - DNA, 20 bp, Arachis hypogaea
  source 1..20: mol_type = other DNA
attaaaatattcgaaatatg

SEQ ID NO: 2866 - DNA, 20 bp, Arachis hypogaea
  source 1..20: mol_type = other DNA
tagaattattttcaacggta

SEQ ID NO: 2867 - DNA, 20 bp, Arachis hypogaea
  source 1..20: mol_type = other DNA
catagtagaattattttcaa

SEQ ID NO: 2868 - DNA, 20 bp, Arachis hypogaea
  source 1..20: mol_type = other DNA
gaaaataattctactatgtt

SEQ ID NO: 2869 - DNA, 20 bp, Arachis hypogaea
  source 1..20: mol_type = other DNA
ttgcaattatataaattctg

SEQ ID NO: 2870 - DNA, 20 bp, Arachis hypogaea
  source 1..20: mol_type = other DNA
tttgcaattatataaattct

SEQ ID NO: 2871 - DNA, 20 bp, Arachis hypogaea
  source 1..20: mol_type = other DNA
gtttgcaattatataaattc

SEQ ID NO: 2872 - DNA, 20 bp, Arachis hypogaea
  source 1..20: mol_type = other DNA
gaatttatataattgcaaac

SEQ ID NO: 2873 - DNA, 20 bp, Arachis hypogaea
  source 1..20: mol_type = other DNA
aatttatataattgcaaacc

SEQ ID NO: 2874 - DNA, 20 bp, Arachis hypogaea
  source 1..20: mol_type = other DNA
ataattgcaaaccgggttaa

SEQ ID NO: 2875 - DNA, 20 bp, Arachis hypogaea
  source 1..20: mol_type = other DNA
tttccacattccctttaacc

SEQ ID NO: 2876 - DNA, 20 bp, Arachis hypogaea
  source 1..20: mol_type = other DNA
taattgcaaaccgggttaaa

SEQ ID NO: 2877 - DNA, 20 bp, Arachis hypogaea
  source 1..20: mol_type = other DNA
aaaccgggttaaagggaatg

SEQ ID NO: 2878 - DNA, 20 bp, Arachis hypogaea
  source 1..20: mol_type = other DNA
gggaatgtggaaaatgagaa

SEQ ID NO: 2879 - DNA, 20 bp, Arachis hypogaea
  source 1..20: mol_type = other DNA
aatacggcccaatcactctc

SEQ ID NO: 2880 - DNA, 20 bp, Arachis hypogaea
  source 1..20: mol_type = other DNA
gaagttagccagagagtgat

SEQ ID NO: 2881 - DNA, 20 bp, Arachis hypogaea
  source 1..20: mol_type = other DNA
aagttagccagagagtgatt

SEQ ID NO: 2882 - DNA, 20 bp, Arachis hypogaea
  source 1..20: mol_type = other DNA
agagagtgattgggccgtat

SEQ ID NO: 2883 - DNA, 20 bp, Arachis hypogaea
  source 1..20: mol_type = other DNA
ttaggtcacaaggtccaata

SEQ ID NO: 2884 - DNA, 20 bp, Arachis hypogaea
  source 1..20: mol_type = other DNA
tatatcatgcttaggtcaca

SEQ ID NO: 2885 - DNA, 20 bp, Arachis hypogaea
  source 1..20: mol_type = other DNA
ttacctcttatatcatgctt

SEQ ID NO: 2886 - DNA, 20 bp, Arachis hypogaea
  source 1..20: mol_type = other DNA
tgacctaagcatgatataag

SEQ ID NO: 2887 - DNA, 20 bp, Arachis hypogaea
  source 1..20: mol_type = other DNA
taatgctttttatatgtagc

SEQ ID NO: 2888 - DNA, 20 bp, Arachis hypogaea
  source 1..20: mol_type = other DNA
atttgtagattattattttt

SEQ ID NO: 2889 - DNA, 20 bp, Arachis hypogaea
  source 1..20: mol_type = other DNA
tactttttttttgtttacgg

SEQ ID NO: 2890 - DNA, 20 bp, Arachis hypogaea
  source 1..20: mol_type = other DNA
acctactttttttttgttta

SEQ ID NO: 2891 - DNA, 20 bp, Arachis hypogaea
  source 1..20: mol_type = other DNA
accgtaaacaaaaaaaaagt

SEQ ID NO: 2892 - DNA, 20 bp, Arachis hypogaea
  source 1..20: mol_type = other DNA
taataacaattgttatcctg

SEQ ID NO: 2893 - DNA, 20 bp, Arachis hypogaea
  source 1..20: mol_type = other DNA
tttatattgttagtatcctc

SEQ ID NO: 2894 - DNA, 20 bp, Arachis hypogaea
  source 1..20: mol_type = other DNA
gaggatactaacaatataaa

SEQ ID NO: 2895 - DNA, 20 bp, Arachis hypogaea
  source 1..20: mol_type = other DNA
actattattagtattatatt

SEQ ID NO: 2896 - DNA, 20 bp, Arachis hypogaea
  source 1..20: mol_type = other DNA
gttgaagaatactactcctt

SEQ ID NO: 2897 - DNA, 20 bp, Arachis hypogaea
  source 1..20: mol_type = other DNA
acttttttcttcttatccta

SEQ ID NO: 2898 - DNA, 20 bp, Arachis hypogaea
  source 1..20: mol_type = other DNA
aacaaaaaataattatgtga

SEQ ID NO: 2899 - DNA, 20 bp, Arachis hypogaea
  source 1..20: mol_type = other DNA
tttaaagaataaaaattttg

SEQ ID NO: 2900 - DNA, 20 bp, Arachis hypogaea
  source 1..20: mol_type = other DNA
ttcttttaaattgtttatag

SEQ ID NO: 2901 - DNA, 20 bp, Arachis hypogaea
  source 1..20: mol_type = other DNA
caaattagaaaaatattatt

SEQ ID NO: 2902 - DNA, 20 bp, Arachis hypogaea
  source 1..20: mol_type = other DNA
ttcaaacggagaaaaaaatt

SEQ ID NO: 2903 - DNA, 20 bp, Arachis hypogaea
  source 1..20: mol_type = other DNA
caaaataatatttgttcaaa

SEQ ID NO: 2904 - DNA, 20 bp, Arachis hypogaea
  source 1..20: mol_type = other DNA
tgaacaaatattattttgaa

SEQ ID NO: 2905 - DNA, 20 bp, Arachis hypogaea
  source 1..20: mol_type = other DNA
taaaataattttttttagaa

SEQ ID NO: 2906 - DNA, 20 bp, Arachis hypogaea
  source 1..20: mol_type = other DNA
tttttagaaaggaaaaaaat

SEQ ID NO: 2907 - DNA, 20 bp, Arachis hypogaea
  source 1..20: mol_type = other DNA
ggaaaaaaataggtgaatca

SEQ ID NO: 2908 - DNA, 20 bp, Arachis hypogaea
  source 1..20: mol_type = other DNA
aaactagaaagtcaatttta

SEQ ID NO: 2909 - DNA, 20 bp, Arachis hypogaea
  source 1..20: mol_type = other DNA
tttctgataactaagtgtct

SEQ ID NO: 2910 - DNA, 20 bp, Arachis hypogaea
  source 1..20: mol_type = other DNA
cattaattataaatgtttcc

SEQ ID NO: 2911 - DNA, 20 bp, Arachis hypogaea
  source 1..20: mol_type = other DNA
cttcaggacttttaaggtcc

SEQ ID NO: 2912 - DNA, 20 bp, Arachis hypogaea
  source 1..20: mol_type = other DNA
aagtatcttcaggactttta

SEQ ID NO: 2913 - DNA, 20 bp, Arachis hypogaea
  source 1..20: mol_type = other DNA
tccacggtgaaagtatcttc

SEQ ID NO: 2914 - DNA, 20 bp, Arachis hypogaea
  source 1..20: mol_type = other DNA
tcctgaagatactttcaccg

SEQ ID NO: 2915 - DNA, 20 bp, Arachis hypogaea
  source 1..20: mol_type = other DNA
aaagaaggaggcttcttcca

SEQ ID NO: 2916 - DNA, 20 bp, Arachis hypogaea
  source 1..20: mol_type = other DNA
aggggagagacaaaagaagg

SEQ ID NO: 2917 - DNA, 20 bp, Arachis hypogaea
  source 1..20: mol_type = other DNA
ataaggggagagacaaaaga

SEQ ID NO: 2918 - DNA, 20 bp, Arachis hypogaea
  source 1..20: mol_type = other DNA
tgcttgagaattgagataag

SEQ ID NO: 2919 - DNA, 20 bp, Arachis hypogaea
  source 1..20: mol_type = other DNA
gtgcttgagaattgagataa

SEQ ID NO: 2920 - DNA, 20 bp, Arachis hypogaea
  source 1..20: mol_type = other DNA
tgtgcttgagaattgagata

SEQ ID NO: 2921 - DNA, 20 bp, Arachis hypogaea
  source 1..20: mol_type = other DNA
aaaaagttgcatgggaatat

SEQ ID NO: 2922 - DNA, 20 bp, Arachis hypogaea
  source 1..20: mol_type = other DNA
aattaaaaaaaaagttgcat

SEQ ID NO: 2923 - DNA, 20 bp, Arachis hypogaea
  source 1..20: mol_type = other DNA
taattaaaaaaaaagttgca

SEQ ID NO: 2924 - DNA, 20 bp, Arachis hypogaea
  source 1..20: mol_type = other DNA
actttaactatgtattgaat

SEQ ID NO: 2925 - DNA, 20 bp, Arachis hypogaea
  source 1..20: mol_type = other DNA
cttataaaattataaagctt

SEQ ID NO: 2926 - DNA, 20 bp, Arachis hypogaea
  source 1..20: mol_type = other DNA
tcttataaaattataaagct

SEQ ID NO: 2927 - DNA, 20 bp, Arachis hypogaea
  source 1..20: mol_type = other DNA
gtaaactcattggtatatta

SEQ ID NO: 2928 - DNA, 20 bp, Arachis hypogaea
  source 1..20: mol_type = other DNA
aaattaaatagtaaactcat

SEQ ID NO: 2929 - DNA, 20 bp, Arachis hypogaea
  source 1..20: mol_type = other DNA
aaaaccacttcgatattttt

SEQ ID NO: 2930 - DNA, 20 bp, Arachis hypogaea
  source 1..20: mol_type = other DNA
aaaaaccacttcgatatttt

SEQ ID NO: 2931 - DNA, 20 bp, Arachis hypogaea
  source 1..20: mol_type = other DNA
atttcccaaaaatatcgaag

SEQ ID NO: 2932 - DNA, 20 bp, Arachis hypogaea
  source 1..20: mol_type = other DNA
aaaaaaaaatgtttaaatgt

SEQ ID NO: 2933 - DNA, 20 bp, Arachis hypogaea
  source 1..20: mol_type = other DNA
aaaaaaaaaatgtttaaatg

SEQ ID NO: 2934 - DNA, 20 bp, Arachis hypogaea
  source 1..20: mol_type = other DNA
attttttttttattaaaaat

SEQ ID NO: 2935 - DNA, 20 bp, Arachis hypogaea
  source 1..20: mol_type = other DNA
aaaataggtaactttactca

SEQ ID NO: 2936 - DNA, 20 bp, Arachis hypogaea
  source 1..20: mol_type = other DNA
atagattttataattttttt

SEQ ID NO: 2937 - DNA, 20 bp, Arachis hypogaea
  source 1..20: mol_type = other DNA
tagattttataatttttttt

SEQ ID NO: 2938 - DNA, 20 bp, Arachis hypogaea
  source 1..20: mol_type = other DNA
ataaaaatttaattacaaat

SEQ ID NO: 2939 - DNA, 20 bp, Arachis hypogaea
  source 1..20: mol_type = other DNA
attttttaaattaaaaatta

SEQ ID NO: 2940 - DNA, 20 bp, Arachis hypogaea
  source 1..20: mol_type = other DNA
tattttttaaattaaaaatt

SEQ ID NO: 2941 - DNA, 20 bp, Arachis hypogaea
  source 1..20: mol_type = other DNA
acgagatatttaaatttttt

SEQ ID NO: 2942 - DNA, 20 bp, Arachis hypogaea
  source 1..20: mol_type = other DNA
gtaaaccataaataggttct

SEQ ID NO: 2943 - DNA, 20 bp, Arachis hypogaea
  source 1..20: mol_type = other DNA
aaaaaccaagaacctattta

SEQ ID NO: 2944 - DNA, 20 bp, Arachis hypogaea
  source 1..20: mol_type = other DNA
ctgatgagtaaaccataaat

SEQ ID NO: 2945 - DNA, 20 bp, Arachis hypogaea
  source 1..20: mol_type = other DNA
tcataacattaattaattaa

SEQ ID NO: 2946 - DNA, 20 bp, Arachis hypogaea
  source 1..20: mol_type = other DNA
tttgaaataactgtctattt

SEQ ID NO: 2947 - DNA, 20 bp, Arachis hypogaea
  source 1..20: mol_type = other DNA
ctttgaaataactgtctatt

SEQ ID NO: 2948 - DNA, 20 bp, Arachis hypogaea
  source 1..20: mol_type = other DNA
agacagttatttcaaagaaa

SEQ ID NO: 2949 - DNA, 20 bp, Arachis hypogaea
  source 1..20: mol_type = other DNA
ccatggcatgctttcaataa

SEQ ID NO: 2950 - DNA, 20 bp, Arachis hypogaea
  source 1..20: mol_type = other DNA
ccattattgaaagcatgcca

SEQ ID NO: 2951 - DNA, 20 bp, Arachis hypogaea
  source 1..20: mol_type = other DNA
cctttctctgctggggacca

SEQ ID NO: 2952 - DNA, 20 bp, Arachis hypogaea
  source 1..20: mol_type = other DNA
acaggaccctttctctgctg

SEQ ID NO: 2953 - DNA, 20 bp, Arachis hypogaea
  source 1..20: mol_type = other DNA
tacaggaccctttctctgct

SEQ ID NO: 2954 - DNA, 20 bp, Arachis hypogaea
  source 1..20: mol_type = other DNA
ttacaggaccctttctctgc

SEQ ID NO: 2955 - DNA, 20 bp, Arachis hypogaea
  source 1..20: mol_type = other DNA
ccatggtccccagcagagaa

SEQ ID NO: 2956 - DNA, 20 bp, Arachis hypogaea
  source 1..20: mol_type = other DNA
catggtccccagcagagaaa

SEQ ID NO: 2957 - DNA, 20 bp, Arachis hypogaea
  source 1..20: mol_type = other DNA
tgatcaccatacattgttac

SEQ ID NO: 2958 - DNA, 20 bp, Arachis hypogaea
  source 1..20: mol_type = other DNA
aagggtcctgtaacaatgta

SEQ ID NO: 2959 - DNA, 20 bp, Arachis hypogaea
  source 1..20: mol_type = other DNA
cacctgtccctttaactgac

SEQ ID NO: 2960 - DNA, 20 bp, Arachis hypogaea
  source 1..20: mol_type = other DNA
agaagacaccagtcagttaa

SEQ ID NO: 2961 - DNA, 20 bp, Arachis hypogaea
  source 1..20: mol_type = other DNA
gaagacaccagtcagttaaa

SEQ ID NO: 2962 - DNA, 20 bp, Arachis hypogaea
  source 1..20: mol_type = other DNA
caccagtcagttaaagggac

SEQ ID NO: 2963 - DNA, 20 bp, Arachis hypogaea
  source 1..20: mol_type = other DNA
tttgcatgaaactgaggtgg

SEQ ID NO: 2964 - DNA, 20 bp, Arachis hypogaea
  source 1..20: mol_type = other DNA
ggctttgcatgaaactgagg

SEQ ID NO: 2965 - DNA, 20 bp, Arachis hypogaea
  source 1..20: mol_type = other DNA
ggcggctttgcatgaaactg

SEQ ID NO: 2966 - DNA, 20 bp, Arachis hypogaea
  source 1..20: mol_type = other DNA
ggtgcattgctgtgtcgtgg

SEQ ID NO: 2967 - DNA, 20 bp, Arachis hypogaea
  source 1..20: mol_type = other DNA
gagggtgcattgctgtgtcg

SEQ ID NO: 2968 - DNA, 20 bp, Arachis hypogaea
  source 1..20: mol_type = other DNA
gttaagctggcaaaagggga

SEQ ID NO: 2969 - DNA, 20 bp, Arachis hypogaea
  source 1..20: mol_type = other DNA
ggttaagctggcaaaagggg

SEQ ID NO: 2970 - DNA, 20 bp, Arachis hypogaea
  source 1..20: mol_type = other DNA
ggaggttaagctggcaaaag

SEQ ID NO: 2971 - DNA, 20 bp, Arachis hypogaea
  source 1..20: mol_type = other DNA
gggaggttaagctggcaaaa

SEQ ID NO: 2972 - DNA, 20 bp, Arachis hypogaea
  source 1..20: mol_type = other DNA
agggaggttaagctggcaaa

SEQ ID NO: 2973 - DNA, 20 bp, Arachis hypogaea
  source 1..20: mol_type = other DNA
gcaatgaagggaggttaagc

SEQ ID NO: 2974 - DNA, 20 bp, Arachis hypogaea
  source 1..20: mol_type = other DNA
atgtatatagcaatgaaggg

SEQ ID NO: 2975 - DNA, 20 bp, Arachis hypogaea
  source 1..20: mol_type = other DNA
ggaatgtatatagcaatgaa

SEQ ID NO: 2976 - DNA, 20 bp, Arachis hypogaea
  source 1..20: mol_type = other DNA
gggaatgtatatagcaatga

SEQ ID NO: 2977 - DNA, 20 bp, Arachis hypogaea
  source 1..20: mol_type = other DNA
aagagtgagagagaagtgaa

SEQ ID NO: 2978 - DNA, 20 bp, Arachis hypogaea
  source 1..20: mol_type = other DNA
gaagagtgagagagaagtga

SEQ ID NO: 2979 - DNA, 20 bp, Arachis hypogaea
  source 1..20: mol_type = other DNA
acaagaagtgatggggtttg

SEQ ID NO: 2980 - DNA, 20 bp, Arachis hypogaea
  source 1..20: mol_type = other DNA
tttttagacaagaagtgatg

SEQ ID NO: 2981 - DNA, 20 bp, Arachis hypogaea
  source 1..20: mol_type = other DNA
atttttagacaagaagtgat

SEQ ID NO: 2982 - DNA, 20 bp, Arachis hypogaea
  source 1..20: mol_type = other DNA
aatttttagacaagaagtga

SEQ ID NO: 2983 - DNA, 20 bp, Arachis hypogaea
  source 1..20: mol_type = other DNA
gtaaatgggtttttggtggc

SEQ ID NO: 2984 - DNA, 20 bp, Arachis hypogaea
  source 1..20: mol_type = other DNA
aatggtaaatgggtttttgg

SEQ ID NO: 2985 - DNA, 20 bp, Arachis hypogaea
  source 1..20: mol_type = other DNA
cataatggtaaatgggtttt

SEQ ID NO: 2986 - DNA, 20 bp, Arachis hypogaea
  source 1..20: mol_type = other DNA
gatcagacataatggtaaat

SEQ ID NO: 2987 - DNA, 20 bp, Arachis hypogaea
  source 1..20: mol_type = other DNA
tgatcagacataatggtaaa

SEQ ID NO: 2988 - DNA, 20 bp, Arachis hypogaea
  source 1..20: mol_type = other DNA
ccttgtttgatcagacataa

SEQ ID NO: 2989 - DNA, 20 bp, Arachis hypogaea
  source 1..20: mol_type = other DNA
ccattatgtctgatcaaaca

SEQ ID NO: 2990 - DNA, 20 bp, Arachis hypogaea
  source 1..20: mol_type = other DNA
atgtctgatcaaacaaggac

SEQ ID NO: 2991 - DNA, 20 bp, Arachis hypogaea
  source 1..20: mol_type = other DNA
gatcaaacaaggacaggcta

SEQ ID NO: 2992 - DNA, 20 bp, Arachis hypogaea
  source 1..20: mol_type = other DNA
caaacaaggacaggctatgg

SEQ ID NO: 2993 - DNA, 20 bp, Arachis hypogaea
  source 1..20: mol_type = other DNA
acaaggacaggctatggagg

SEQ ID NO: 2994 - DNA, 20 bp, Arachis hypogaea
  source 1..20: mol_type = other DNA
aggacaggctatggaggagg

SEQ ID NO: 2995 - DNA, 20 bp, Arachis hypogaea
  source 1..20: mol_type = other DNA
ggacaggctatggaggagga

SEQ ID NO: 2996 - DNA, 20 bp, Arachis hypogaea
  source 1..20: mol_type = other DNA
tatggaggaggagggtccta

SEQ ID NO: 2997 - DNA, 20 bp, Arachis hypogaea
  source 1..20: mol_type = other DNA
tccaccataggatgatccat

SEQ ID NO: 2998 - DNA, 20 bp, Arachis hypogaea
  source 1..20: mol_type = other DNA
gggtcctatggatcatccta

SEQ ID NO: 2999 - DNA, 20 bp, Arachis hypogaea
  source 1..20: mol_type = other DNA
tcctatggatcatcctatgg

SEQ ID NO: 3000 - DNA, 20 bp, Arachis hypogaea
  source 1..20: mol_type = other DNA
ataggtgcctcctccaccat

SEQ ID NO: 3001 - DNA, 20 bp, Arachis hypogaea
  source 1..20: mol_type = other DNA
tatggatcatcctatggtgg

SEQ ID NO: 3002 - DNA, 20 bp, Arachis hypogaea
  source 1..20: mol_type = other DNA
ggatcatcctatggtggagg

SEQ ID NO: 3003 - DNA, 20 bp, Arachis hypogaea
  source 1..20: mol_type = other DNA
tatggtggaggaggcaccta

SEQ ID NO: 3004 - DNA, 20 bp, Arachis hypogaea
  source 1..20: mol_type = other DNA
ggttccataagatgaaccat

SEQ ID NO: 3005 - DNA, 20 bp, Arachis hypogaea
  source 1..20: mol_type = other DNA
ggcacctatggttcatctta

SEQ ID NO: 3006 - DNA, 20 bp, Arachis hypogaea
  source 1..20: mol_type = other DNA
gttagtactggggtcatagg

SEQ ID NO: 3007 - DNA, 20 bp, Arachis hypogaea
  source 1..20: mol_type = other DNA
ttggttagtactggggtcat

SEQ ID NO: 3008 - DNA, 20 bp, Arachis hypogaea
  source 1..20: mol_type = other DNA
gtataggttggttagtactg

SEQ ID NO: 3009 - DNA, 20 bp, Arachis hypogaea
  source 1..20: mol_type = other DNA
cgtataggttggttagtact

SEQ ID NO: 3010 - DNA, 20 bp, Arachis hypogaea
  source 1..20: mol_type = other DNA
gcgtataggttggttagtac

SEQ ID NO: 3011 - DNA, 20 bp, Arachis hypogaea
  source 1..20: mol_type = other DNA
tgatggcttggcgtataggt

SEQ ID NO: 3012 - DNA, 20 bp, Arachis hypogaea
  source 1..20: mol_type = other DNA
aacttgatggcttggcgtat

SEQ ID NO: 3013 - DNA, 20 bp, Arachis hypogaea
  source 1..20: mol_type = other DNA
ctgtcatgaacttgatggct

SEQ ID NO: 3014 - DNA, 20 bp, Arachis hypogaea
  source 1..20: mol_type = other DNA
tgatgctgtcatgaacttga

SEQ ID NO: 3015 - DNA, 20 bp, Arachis hypogaea
  source 1..20: mol_type = other DNA
ttcatgacagcatcaaccat

SEQ ID NO: 3016 - DNA, 20 bp, Arachis hypogaea
  source 1..20: mol_type = other DNA
gatcaagaatgagacaccaa

SEQ ID NO: 3017 - DNA, 20 bp, Arachis hypogaea
  source 1..20: mol_type = other DNA
gtctcattcttgatcctgtc

SEQ ID NO: 3018 - DNA, 20 bp, Arachis hypogaea
  source 1..20: mol_type = other DNA
tctcattcttgatcctgtct

SEQ ID NO: 3019 - DNA, 20 bp, Arachis hypogaea
  source 1..20: mol_type = other DNA
cagtgaggatcaacccagac

SEQ ID NO: 3020 - DNA, 20 bp, Arachis hypogaea
  source 1..20: mol_type = other DNA
ctgtctgggttgatcctcac

SEQ ID NO: 3021 - DNA, 20 bp, Arachis hypogaea
  source 1..20: mol_type = other DNA
aacctatgacagttccagtg

SEQ ID NO: 3022 - DNA, 20 bp, Arachis hypogaea
  source 1..20: mol_type = other DNA
atcctcactggaactgtcat

SEQ ID NO: 3023 - DNA, 20 bp, Arachis hypogaea
  source 1..20: mol_type = other DNA
ggactgaagataacaagaag

SEQ ID NO: 3024 - DNA, 20 bp, Arachis hypogaea
  source 1..20: mol_type = other DNA
atggcagcagggacaaggat

SEQ ID NO: 3025 - DNA, 20 bp, Arachis hypogaea
  source 1..20: mol_type = other DNA
gggttatggcagcagggaca

SEQ ID NO: 3026 - DNA, 20 bp, Arachis hypogaea
  source 1..20: mol_type = other DNA
gtgcaagggttatggcagca

SEQ ID NO: 3027 - DNA, 20 bp, Arachis hypogaea
  source 1..20: mol_type = other DNA
agtgcaagggttatggcagc

SEQ ID NO: 3028 - DNA, 20 bp, Arachis hypogaea
  source 1..20: mol_type = other DNA
agcagccagtgcaagggtta

SEQ ID NO: 3029 - DNA, 20 bp, Arachis hypogaea
  source 1..20: mol_type = other DNA
tgctgccataacccttgcac

SEQ ID NO: 3030 - DNA, 20 bp, Arachis hypogaea
  source 1..20: mol_type = other DNA
tccaccagcagccagtgcaa

SEQ ID NO: 3031 - DNA, 20 bp, Arachis hypogaea
  source 1..20: mol_type = other DNA
atccaccagcagccagtgca

SEQ ID NO: 3032 - DNA, 20 bp, Arachis hypogaea
  source 1..20: mol_type = other DNA
ataacccttgcactggctgc

SEQ ID NO: 3033 - DNA, 20 bp, Arachis hypogaea
  source 1..20: mol_type = other DNA
acccttgcactggctgctgg

SEQ ID NO: 3034 - DNA, 20 bp, Arachis hypogaea
  source 1..20: mol_type = other DNA
gctggtggatttttgttctc

SEQ ID NO: 3035 - DNA, 20 bp, Arachis hypogaea
  source 1..20: mol_type = other DNA
ggtggatttttgttctctgg

SEQ ID NO: 3036 - DNA, 20 bp, Arachis hypogaea
  source 1..20: mol_type = other DNA
tttttgttctctggtggctg

SEQ ID NO: 3037 - DNA, 20 bp, Arachis hypogaea
  source 1..20: mol_type = other DNA
caaccatgacaatgcagcaa

SEQ ID NO: 3038 - DNA, 20 bp, Arachis hypogaea
  source 1..20: mol_type = other DNA
ctgccattgctgcattgtca

SEQ ID NO: 3039 - DNA, 20 bp, Arachis hypogaea
  source 1..20: mol_type = other DNA
tggttgtacagctatgtcac

SEQ ID NO: 3040 - DNA, 20 bp, Arachis hypogaea
  source 1..20: mol_type = other DNA
ggttgtacagctatgtcact

SEQ ID NO: 3041 - DNA, 20 bp, Arachis hypogaea
  source 1..20: mol_type = other DNA
gtcactgggaaacaccctgc

SEQ ID NO: 3042 - DNA, 20 bp, Arachis hypogaea
  source 1..20: mol_type = other DNA
caagcctatcagagccagca

SEQ ID NO: 3043 - DNA, 20 bp, Arachis hypogaea
  source 1..20: mol_type = other DNA
tcaagcctatcagagccagc

SEQ ID NO: 3044 - DNA, 20 bp, Arachis hypogaea
  source 1..20: mol_type = other DNA
aacaccctgctggctctgat

SEQ ID NO: 3045 - DNA, 20 bp, Arachis hypogaea
  source 1..20: mol_type = other DNA
gataggcttgattatgctaa

SEQ ID NO: 3046 - DNA, 20 bp, Arachis hypogaea
  source 1..20: mol_type = other DNA
ataggcttgattatgctaaa

SEQ ID NO: 3047 - DNA, 20 bp, Arachis hypogaea
  source 1..20: mol_type = other DNA
taggcttgattatgctaaag

SEQ ID NO: 3048 - DNA, 20 bp, Arachis hypogaea
  source 1..20: mol_type = other DNA
taaaggggtgattgctgata

SEQ ID NO: 3049 - DNA, 20 bp, Arachis hypogaea
  source 1..20: mol_type = other DNA
gggtgattgctgataaggct

SEQ ID NO: 3050 - DNA, 20 bp, Arachis hypogaea
  source 1..20: mol_type = other DNA
ggtgattgctgataaggcta

SEQ ID NO: 3051 - DNA, 20 bp, Arachis hypogaea
  source 1..20: mol_type = other DNA
tgataaggctagggatgtta

SEQ ID NO: 3052 - DNA, 20 bp, Arachis hypogaea
  source 1..20: mol_type = other DNA
aggctagggatgttaaggac

SEQ ID NO: 3053 - DNA, 20 bp, Arachis hypogaea
  source 1..20: mol_type = other DNA
ggctagggatgttaaggaca

SEQ ID NO: 3054 - DNA, 20 bp, Arachis hypogaea
  source 1..20: mol_type = other DNA
ggatgttaaggacagggcca

SEQ ID NO: 3055 - DNA, 20 bp, Arachis hypogaea
  source 1..20: mol_type = other DNA
accagcaccagcataatcct

SEQ ID NO: 3056 - DNA, 20 bp, Arachis hypogaea
  source 1..20: mol_type = other DNA
gacagggccaaggattatgc

SEQ ID NO: 3057 - DNA, 20 bp, Arachis hypogaea
  source 1..20: mol_type = other DNA
gccaaggattatgctggtgc

SEQ ID NO: 3058 - DNA, 20 bp, Arachis hypogaea
  source 1..20: mol_type = other DNA
aggattatgctggtgctggt

SEQ ID NO: 3059 - DNA, 20 bp, Arachis hypogaea
  source 1..20: mol_type = other DNA
ggattatgctggtgctggta

SEQ ID NO: 3060 - DNA, 20 bp, Arachis hypogaea
  source 1..20: mol_type = other DNA
tgctggtgctggtagggctc

SEQ ID NO: 3061 - DNA, 20 bp, Arachis hypogaea
  source 1..20: mol_type = other DNA
tggtgctggtagggctcagg

SEQ ID NO: 3062 - DNA, 20 bp, Arachis hypogaea
  source 1..20: mol_type = other DNA
ggtgctggtagggctcagga

SEQ ID NO: 3063 - DNA, 20 bp, Arachis hypogaea
  source 1..20: mol_type = other DNA
agggctcaggagggcacaca

SEQ ID NO: 3064 - DNA, 20 bp, Arachis hypogaea
  source 1..20: mol_type = other DNA
gggctcaggagggcacacaa

SEQ ID NO: 3065 - DNA, 5590 bp, Arachis hypogaea
  source 1..5590: mol_type = genomic DNA
aactttacgcttaaatactccttctttgcgccccatacccctctgcccccttctctcatttcctcacaccttcttcatttgccgccacacacattcctcctcctccgtcacaccttctcctccatccaggtacacctccttctccctctttctcctcaattcaattcaatgccatgctacctgcttattaatcaatcgcacttcacgctttttcttccgcactcgcctagatctaactaaccttttcactggatgccatagatctcttcgttcattaattcattatatgtggtggtaatttctgattcagtagggtccattgtgttacataattgaagcattcataatcccccttacctccctccttgctttcctcatgtcttattttttatttccgtatcaagaatgtgttatctctgagatgtttttgcattatttgcatctctttcctctttccctttcatcatagcatcacaaaattatttaaccaattatgtctccacttgtttgtctctttccaagcaacgattctttccgtcgtattttactattattttctaacttctaaggataaataaattattaaataaaatatgtttgtatgtgcatttttttttcttttttaacgtgcggctaatggctatgagcatatttaggtaaggttctctcggatctaagcaacaacctcacatttccggattttttgtacggtttctcgctccgttctccaacaaaatagcccagacccttttcttattcatttccaatattattttatcgtaattattttatcattccgctacttaccaacagcatttttatcaatttctatcaattttatttataagtttatttaataaaaatatttttataaatgtatctgataagaatattttttttatgactatatttaataaaaatactttttaaatatatttttttatatatatttaaaatataataattaattattattagtagataatgtgttgatattctatacttttacttattctaatttagggactaatcttttggcaagcaaattaaaaaataaggtggcacgcagatctcgtggaaaatattatatcaattgattgattcgtctttgatgtgcactcgtgattttcattttatgtattatttttttttttctctaggtggagatatttttttatattactgtagtattctatgtgtaatttggactaattgattggtaagatgtgtgtgttttgattctatgatcctagttgggtttacaactcacaaatagccaatgctaggaaagcctcaattaacgaaattacccttgttggtttagaaagatcatttccaaccgacgtcaacttgcgcacttctattataggctaaaatcgtcacttgacttaaaaagaaaagttgagagtagacagaattaaaggtcaaaaaaggacgcgttacaagttttcatcgtgttatgcacaagttggaacaaattaaaaatgcaaaacagggactaaatctttaaaatgagtaaaatgagactcctgtttatactatatgatattattatatatttgccaacatatagttaagaatttacatctaatgtttcttcttatttttgttacttttacggtcaccccataatgtttctaattttaatgtttgattgattctttgaaaatcttaaaatcgatttggttaaaagtgttacaagtatattaattaaatgagtttaaagttttttttaatattttaatgaatagtccaactcaacatttattagctagtgcctagtagtacctttttaaaaattaatttcaccaacaaaagctccaacctttatagtggtatttagtagttagtgtgtttatgaggttacaagagagggccactccaatgctccttttgggtaggaagagataagaaaattgaagagaatggaaaaagagaaaataactactatataaaatgacagattcatgtttagtagtttgttggtgtcatggtaaaaatctatggcaatttgttataattgagggacggcatttccgagagaggtaataacatatacagtgaggtcactctgagcgagtactttattagggtcggctgattccccaaaactgcaaaagaacacatttcagagctagctcctttttttacccatttcatgtgccactcataccagtcaactacagtaagcgttaaggaacttttatatgagataatttttatagcctttttaaagaaattcttaattttgttgaaatactagaaagagtaacatgaataacttctataacaattttttttttgttaaaatgtttattgtattctcaaataaactgaaacaaatgtatcctgttttcttttctggttggtaccgtctgtggctatgatatgatatggaccaattatgtggaggagtagcatttagattgcataattagggcatacttgaaatgttgaataaattgaaagatgagtctgcaagactgcaacttgcatagcatgcaaagccataattatttaattgaagaaccatgtcagatataggacacaatgtagctatagtcatgtgcattagttgatgttgaaatcccgtgtgctccactattggttttggacacacactaggcaagtccctatctactttggacgggaccggagaccccattggctctgatccacaaaaatattcaccaaatttattgcacatgcagtggtccattgtagagaattgctaatatataatgttgcctaacatgtagtcttttggaaggtttattttgtatttgtggctcttatgacattattcagtttaactgcatgcatgcctgatttttcggttaaaaaatattcttaataatcctaattattataacctaaaaagacttgtcaatctgatgtgtagtttagttgttgacattaatgatgtattcttgtgtatgtctagtttttttaaaccttaaccataataatttgtgtgacatatgcctgctttgaaaggccatgactcatgcaggcaaagttatggcagcctcgtaatatcaaagagaaattctttgatgcctatgaaatttttgtctaaattgcttaaaagtaaagatagagtaggtgggatctacccttttatttttgaattttgtagccaatcatctaataagaaaaataaaaaagcttaacacaaaagcagagcgtatccatggcttcttgtaccaatttctcctggcacattactaattcgcttggcgtagatctacttgttgttaatagatcgataagagtattgttccgatagataactcttcgataaagttcattaatatctgagctcattagttttcccccatcgatttgaataatgggtctcaattcggggggaagaactggtaagaccttttctcgttcgcgctaccagcggagcacgagaccattatcaaaatactctgactagtgcaagctcatatccatgttttttattctataattttcttttctatattttcaactgatgactttgtatcaagttaattaacttgaccaaaaatcataaaatttcctgcaatcttgcgcctttccatataattctgtgttcatgatgaaagtctatataatttttgtatttgtaaatgctggaaaggtgttttgcttttatttgaggagttttagtttttcaccatttttttacttactgattgggaaaggaaatgaaaattaacgaacctgtaaacagtgacgactataatatcccgttaataatgttcttgtgtagtgtttaattaattatctgtttctgctttaaagaccacacaggcacacacattgtccattctcattctttctgcacaaatcaagtaaaagtattagctcacatgtttcttcagatagtgctaaattttattcgggtacaattaaattgtgattaatgctaataagaaacaaatgcgctgttatgttatgtacaggttgcgggaagatgggagctggcggccgaacctctgttcctccttcaaacaggacggtcgaggctgactatgcgaagcgagttccgcatgaaaaacctcccttcagtctcagccaagtcaagaaggccatcccacctcactgttttcagcgttctgttatccgctcattctcctatgttgtctatgatctcaccatagccttttgcctctactatgccgccaccaattacttccacaaactctcttcccctttattttacttggcctggcttctctatggggctgtccaaggttgcatccttaccggtgtttgggtcatcgcgcacgaatgtggccaccatgcattcagtgattatcaatggcttgatgatacagttggccttgttctccactctggcctcttggtcccttacttttcatggaaatacagccaccgtcgccaccactccaacaccggttcccttgacagggatgaagtctttgtgccaaagaagaagtctagtattgcatggtggtctaagtaccttaataacccactaggaagagtcctcacactcactattaccctcacccttggttggccactttacttggcttttaatgtctcgggaaggccttacgataggtttgcttgccactatgacccatatggtccaatctactccgatcgcgaacgacttcaaatatacatatcagatgctggagtgcttgcagtttcctatggtcttatccgtcttgtcatggcaaaaggccttgcctgggttgtggctgtttatggtgttccattgctagtggtcaatggattcttggtgttgatcacatatttgcagcacactcaccctgcattgccacattacgattcatccgagtgggactggttgaggggagcattggcgaccgtggacagagactatggaatcctgaacaaggtcttccataacatcactgacacacatgtggcacatcacttgttctccacaatgccgcattaccatgcaatggaggctacaaatgcaataaaaccaattttgggagagtattatcggttcgatgggactcctttttacaaggcaatgtggagagaggcgaaagagtgtctctatgttgagtcggaccagggtgctcagaataaaggtgtattctggtacaacaataagttgtgatgactagagctgctgtccaagttgtggtgtgtttggtcggaaaagttgtttagtttaaagtttccattctgccaattaggatggttgattattgggaataattctattgaacccctgatattggtagttaaaagtagttttatagtttgcttgattgcagaataagacatggcatgtgttaaacagttagattattgcacagtggtttgaaattggtgcatgtcaactgtgtgttagttcttattctggttgaagcttgttcttattttgtcactcatggcttttgattccaagtcattagtagtatatattctgtgaatggtgcaaaattatggaccactgtctgtaacaatttgtattggtattctactgctagttaaaattcttaggagagtagtgtagacgtggatgggtatgttgaagaatcgtaatatggtaataaaataatataatgtgcctttcactttatca

SEQ ID NO: 3066 - protein, 383 aa, Arachis hypogaea
MGAGGRTSVPPSNRTVEADYAKRVPHEKPPFSLSQVKKAIPPHCFQRSVIRSFSYVVYDLTIAFCLYYAATNYFHKLSSPLFYLAWLLYGAVQGCILTGVWVIAHECGHHAFSDYQWLDDTVGLVLHSGLLVPYFSWKYSHRRHHSNTGSLDRDEVFVPKKKSSIAWWSKYLNNPLGRVLTLTITLTLGWPLYLAFNVSGRPYDRFACHYDPYGPIYSDRERLQIYISDAGVLAVSYGLIRLVMAKGLAWVVAVYGVPLLVVNGFLVLITYLQHTHPALPHYDSSEWDWLRGALATVDRDYGILNKVFHNITDTHVAHHLFSTMPHYHAMEATNAIKPILGEYYRFDGTPFYKAMWREAKECLYVESDQGAQNKGVFWYNNKL

SEQ ID NO: 3067 - DNA, 20 bp, Arachis hypogaea
  source 1..20: mol_type = other DNA
aggggtatggggcgcaaaga

SEQ ID NO: 3068 - DNA, 20 bp, Arachis hypogaea
  source 1..20: mol_type = other DNA
gaagggggcagaggggtatg

SEQ ID NO: 3069 - DNA, 20 bp, Arachis hypogaea
  source 1..20: mol_type = other DNA
agaagggggcagaggggtat

SEQ ID NO: 3070 - DNA, 20 bp, Arachis hypogaea
  source 1..20: mol_type = other DNA
gagaagggggcagaggggta

SEQ ID NO: 3071 - DNA, 20 bp, Arachis hypogaea
  source 1..20: mol_type = other DNA
aatgagagaagggggcagag

SEQ ID NO: 3072 - DNA, 20 bp, Arachis hypogaea
  source 1..20: mol_type = other DNA
aaatgagagaagggggcaga

SEQ ID NO: 3073 - DNA, 20 bp, Arachis hypogaea
  source 1..20: mol_type = other DNA
gaaatgagagaagggggcag

SEQ ID NO: 3074 - DNA, 20 bp, Arachis hypogaea
  source 1..20: mol_type = other DNA
tgtgaggaaatgagagaagg

SEQ ID NO: 3075 - DNA, 20 bp, Arachis hypogaea
  source 1..20: mol_type = other DNA
gtgtgaggaaatgagagaag

SEQ ID NO: 3076 - DNA, 20 bp, Arachis hypogaea
  source 1..20: mol_type = other DNA
ggtgtgaggaaatgagagaa

SEQ ID NO: 3077 - DNA, 20 bp, Arachis hypogaea
  source 1..20: mol_type = other DNA
aggtgtgaggaaatgagaga

SEQ ID NO: 3078 - DNA, 20 bp, Arachis hypogaea
  source 1..20: mol_type = other DNA
cggcaaatgaagaaggtgtg

SEQ ID NO: 3079 - DNA, 20 bp, Arachis hypogaea
  source 1..20: mol_type = other DNA
tgtgtggcggcaaatgaaga

SEQ ID NO: 3080 - DNA, 20 bp, Arachis hypogaea
  source 1..20: mol_type = other DNA
aggaggaggaatgtgtgtgg

SEQ ID NO: 3081 - DNA, 20 bp, Arachis hypogaea
  source 1..20: mol_type = other DNA
cggaggaggaggaatgtgtg

SEQ ID NO: 3082 - DNA, 20 bp, Arachis hypogaea
  source 1..20: mol_type = other DNA
agaaggtgtgacggaggagg

SEQ ID NO: 3083 - DNA, 20 bp, Arachis hypogaea
  source 1..20: mol_type = other DNA
aggagaaggtgtgacggagg

SEQ ID NO: 3084 - DNA, 20 bp, Arachis hypogaea
  source 1..20: mol_type = other DNA
tggaggagaaggtgtgacgg

SEQ ID NO: 3085 - DNA, 20 bp, Arachis hypogaea
  source 1..20: mol_type = other DNA
ggatggaggagaaggtgtga

SEQ ID NO: 3086 - DNA, 20 bp, Arachis hypogaea
  source 1..20: mol_type = other DNA
gtgtacctggatggaggaga

SEQ ID NO: 3087 - DNA, 20 bp, Arachis hypogaea
  source 1..20: mol_type = other DNA
tcacaccttctcctccatcc

SEQ ID NO: 3088 - DNA, 20 bp, Arachis hypogaea
  source 1..20: mol_type = other DNA
aaggaggtgtacctggatgg

SEQ ID NO: 3089 - DNA, 20 bp, Arachis hypogaea
  source 1..20: mol_type = other DNA
gagaaggaggtgtacctgga

SEQ ID NO: 3090 - DNA, 20 bp, Arachis hypogaea
  source 1..20: mol_type = other DNA
gagggagaaggaggtgtacc

SEQ ID NO: 3091 - DNA, 20 bp, Arachis hypogaea
  source 1..20: mol_type = other DNA
gaggagaaagagggagaagg

SEQ ID NO: 3092 - DNA, 20 bp, Arachis hypogaea
  source 1..20: mol_type = other DNA
attgaggagaaagagggaga

SEQ ID NO: 3093 - DNA, 20 bp, Arachis hypogaea
  source 1..20: mol_type = other DNA
aattgaattgaggagaaaga

SEQ ID NO: 3094 - DNA, 20 bp, Arachis hypogaea
  source 1..20: mol_type = other DNA
gaattgaattgaggagaaag

SEQ ID NO: 3095 - DNA, 20 bp, Arachis hypogaea
  source 1..20: mol_type = other DNA
catggcattgaattgaattg

SEQ ID NO: 3096 - DNA, 20 bp, Arachis hypogaea
  source 1..20: mol_type = other DNA
tgattaataagcaggtagca

SEQ ID NO: 3097 - DNA, 20 bp, Arachis hypogaea
  source 1..20: mol_type = other DNA
agtgcgattgattaataagc

SEQ ID NO: 3098 - DNA, 20 bp, Arachis hypogaea
  source 1..20: mol_type = other DNA
tagttagatctaggcgagtg

SEQ ID NO: 3099 - DNA, 20 bp, Arachis hypogaea
  source 1..20: mol_type = other DNA
tgaaaaggttagttagatct

SEQ ID NO: 3100 - DNA, 20 bp, Arachis hypogaea
  source 1..20: mol_type = other DNA
gatctaactaaccttttcac

SEQ ID NO: 3101 - DNA, 20 bp, Arachis hypogaea
  source 1..20: mol_type = other DNA
atctatggcatccagtgaaa

SEQ ID NO: 3102 - DNA, 20 bp, Arachis hypogaea
  source 1..20: mol_type = other DNA
ttaatgaacgaagagatcta

SEQ ID NO: 3103 - DNA, 20 bp, Arachis hypogaea
  source 1..20: mol_type = other DNA
gttcattaattcattatatg

SEQ ID NO: 3104 - DNA, 20 bp, Arachis hypogaea
  source 1..20: mol_type = other DNA
cattaattcattatatgtgg

SEQ ID NO: 3105 - DNA, 20 bp, Arachis hypogaea
  source 1..20: mol_type = other DNA
gtggtaatttctgattcagt

SEQ ID NO: 3106 - DNA, 20 bp, Arachis hypogaea
  source 1..20: mol_type = other DNA
tggtaatttctgattcagta

SEQ ID NO: 3107 - DNA, 20 bp, Arachis hypogaea
  source 1..20: mol_type = other DNA
gcttcaattatgtaacacaa

SEQ ID NO: 3108 - DNA, 20 bp, Arachis hypogaea
  source 1..20: mol_type = other DNA
aagcaaggagggaggtaagg

SEQ ID NO: 3109 - DNA, 20 bp, Arachis hypogaea
  source 1..20: mol_type = other DNA
aaagcaaggagggaggtaag

SEQ ID NO: 3110 - DNA, 20 bp, Arachis hypogaea
  source 1..20: mol_type = other DNA
gaaagcaaggagggaggtaa

SEQ ID NO: 3111 - DNA, 20 bp, Arachis hypogaea
  source 1..20: mol_type = other DNA
ggaaagcaaggagggaggta

SEQ ID NO: 3112 - DNA, 20 bp, Arachis hypogaea
  source 1..20: mol_type = other DNA
catgaggaaagcaaggaggg

SEQ ID NO: 3113 - DNA, 20 bp, Arachis hypogaea
  source 1..20: mol_type = other DNA
agacatgaggaaagcaagga

SEQ ID NO: 3114 - DNA, 20 bp, Arachis hypogaea
  source 1..20: mol_type = other DNA
aagacatgaggaaagcaagg

SEQ ID NO: 3115 - DNA, 20 bp, Arachis hypogaea
  source 1..20: mol_type = other DNA
aataagacatgaggaaagca

SEQ ID NO: 3116 - DNA, 20 bp, Arachis hypogaea
  source 1..20: mol_type = other DNA
gaaataaaaaataagacatg

SEQ ID NO: 3117 - DNA, 20 bp, Arachis hypogaea
  source 1..20: mol_type = other DNA
gagataacacattcttgata

SEQ ID NO: 3118 - DNA, 20 bp, Arachis hypogaea
  source 1..20: mol_type = other DNA
tgctatgatgaaagggaaag

SEQ ID NO: 3119 - DNA, 20 bp, Arachis hypogaea
  source 1..20: mol_type = other DNA
tttgtgatgctatgatgaaa

SEQ ID NO: 3120 - DNA, 20 bp, Arachis hypogaea
  source 1..20: mol_type = other DNA
ttttgtgatgctatgatgaa

SEQ ID NO: 3121 - DNA, 20 bp, Arachis hypogaea
  source 1..20: mol_type = other DNA
caaacaagtggagacataat

SEQ ID NO: 3122 - DNA, 20 bp, Arachis hypogaea
  source 1..20: mol_type = other DNA
cttggaaagagacaaacaag

SEQ ID NO: 3123 - DNA, 20 bp, Arachis hypogaea
  source 1..20: mol_type = other DNA
cgacggaaagaatcgttgct

SEQ ID NO: 3124 - DNA, 20 bp, Arachis hypogaea
  source 1..20: mol_type = other DNA
aaaataatagtaaaatacga

SEQ ID NO: 3125 - DNA, 20 bp, Arachis hypogaea
  source 1..20: mol_type = other DNA
ctattattttctaacttcta

SEQ ID NO: 3126 - DNA, 20 bp, Arachis hypogaea
  source 1..20: mol_type = other DNA
tttttttcttttttaacgtg

SEQ ID NO: 3127 - DNA, 20 bp, Arachis hypogaea
  source 1..20: mol_type = other DNA
cttttttaacgtgcggctaa

SEQ ID NO: 3128 - DNA, 20 bp, Arachis hypogaea
  source 1..20: mol_type = other DNA
taatggctatgagcatattt

SEQ ID NO: 3129 - DNA, 20 bp, Arachis hypogaea
  source 1..20: mol_type = other DNA
gctatgagcatatttaggta

SEQ ID NO: 3130 - DNA, 20 bp, Arachis hypogaea
  source 1..20: mol_type = other DNA
atatttaggtaaggttctct

SEQ ID NO: 3131 - DNA, 20 bp, Arachis hypogaea
  source 1..20: mol_type = other DNA
acaaaaaatccggaaatgtg

SEQ ID NO: 3132 - DNA, 20 bp, Arachis hypogaea
  source 1..20: mol_type = other DNA
aagcaacaacctcacatttc

SEQ ID NO: 3133 - DNA, 20 bp, Arachis hypogaea
  source 1..20: mol_type = other DNA
gagaaaccgtacaaaaaatc

SEQ ID NO: 3134 - DNA, 20 bp, Arachis hypogaea
  source 1..20: mol_type = other DNA
acatttccggattttttgta

SEQ ID NO: 3135 - DNA, 20 bp, Arachis hypogaea
  source 1..20: mol_type = other DNA
tgggctattttgttggagaa

SEQ ID NO: 3136 - DNA, 20 bp, Arachis hypogaea
  source 1..20: mol_type = other DNA
aagggtctgggctattttgt

SEQ ID NO: 3137 - DNA, 20 bp, Arachis hypogaea
  source 1..20: mol_type = other DNA
aatgaataagaaaagggtct

SEQ ID NO: 3138 - DNA, 20 bp, Arachis hypogaea
  source 1..20: mol_type = other DNA
aaatgaataagaaaagggtc

SEQ ID NO: 3139 - DNA, 20 bp, Arachis hypogaea
  source 1..20: mol_type = other DNA
attggaaatgaataagaaaa

SEQ ID NO: 3140 - DNA, 20 bp, Arachis hypogaea
  source 1..20: mol_type = other DNA
tattggaaatgaataagaaa

SEQ ID NO: 3141 - DNA, 20 bp, Arachis hypogaea
  source 1..20: mol_type = other DNA
taattacgataaaataatat

SEQ ID NO: 3142 - DNA, 20 bp, Arachis hypogaea
  source 1..20: mol_type = other DNA
aaaatgctgttggtaagtag

SEQ ID NO: 3143 - DNA, 20 bp, Arachis hypogaea
  source 1..20: mol_type = other DNA
gaaattgataaaaatgctgt

SEQ ID NO: 3144 - DNA, 20 bp, Arachis hypogaea
  source 1..20: mol_type = other DNA
acttttacttattctaattt

SEQ ID NO: 3145 - DNA, 20 bp, Arachis hypogaea
  source 1..20: mol_type = other DNA
cttttacttattctaattta

SEQ ID NO: 3146 - DNA, 20 bp, Arachis hypogaea
  source 1..20: mol_type = other DNA
taatttagggactaatcttt

SEQ ID NO: 3147 - DNA, 20 bp, Arachis hypogaea
  source 1..20: mol_type = other DNA
ggcaagcaaattaaaaaata

SEQ ID NO: 3148 - DNA, 20 bp, Arachis hypogaea
  source 1..20: mol_type = other DNA
aagcaaattaaaaaataagg

SEQ ID NO: 3149 - DNA, 20 bp, Arachis hypogaea
  source 1..20: mol_type = other DNA
aaggtggcacgcagatctcg

SEQ ID NO: 3150 - DNA, 20 bp, Arachis hypogaea
  source 1..20: mol_type = other DNA
tattatttttttttttctct

SEQ ID NO: 3151 - DNA, 20 bp, Arachis hypogaea
  source 1..20: mol_type = other DNA
tatttttttttttctctagg

SEQ ID NO: 3152 - DNA, 20 bp, Arachis hypogaea
  source 1..20: mol_type = other DNA
gtagtattctatgtgtaatt

SEQ ID NO: 3153 - DNA, 20 bp, Arachis hypogaea
  source 1..20: mol_type = other DNA
tgtaatttggactaattgat

SEQ ID NO: 3154 - DNA, 20 bp, Arachis hypogaea
  source 1..20: mol_type = other DNA
tttgattctatgatcctagt

SEQ ID NO: 3155 - DNA, 20 bp, Arachis hypogaea
  source 1..20: mol_type = other DNA
ttgattctatgatcctagtt

SEQ ID NO: 3156 - DNA, 20 bp, Arachis hypogaea
  source 1..20: mol_type = other DNA
tgtgagttgtaaacccaact

SEQ ID NO: 3157 - DNA, 20 bp, Arachis hypogaea
  source 1..20: mol_type = other DNA
actcacaaatagccaatgct

SEQ ID NO: 3158 - DNA, 20 bp, Arachis hypogaea
  source 1..20: mol_type = other DNA
aattgaggctttcctagcat

SEQ ID NO: 3159 - DNA, 20 bp, Arachis hypogaea
  source 1..20: mol_type = other DNA
aagggtaatttcgttaattg

SEQ ID NO: 3160 - DNA, 20 bp, Arachis hypogaea
  source 1..20: mol_type = other DNA
attaacgaaattacccttgt

SEQ ID NO: 3161 - DNA, 20 bp, Arachis hypogaea
  source 1..20: mol_type = other DNA
tgatctttctaaaccaacaa

SEQ ID NO: 3162 - DNA, 20 bp, Arachis hypogaea
  source 1..20: mol_type = other DNA
atgatctttctaaaccaaca

SEQ ID NO: 3163 - DNA, 20 bp, Arachis hypogaea
  source 1..20: mol_type = other DNA
gtgcgcaagttgacgtcggt

SEQ ID NO: 3164 - DNA, 20 bp, Arachis hypogaea
  source 1..20: mol_type = other DNA
agaagtgcgcaagttgacgt

SEQ ID NO: 3165 - DNA, 20 bp, Arachis hypogaea
  source 1..20: mol_type = other DNA
aacttgcgcacttctattat

SEQ ID NO: 3166 - DNA, 20 bp, Arachis hypogaea
  source 1..20: mol_type = other DNA
ttgagagtagacagaattaa

SEQ ID NO: 3167 - DNA, 20 bp, Arachis hypogaea
  source 1..20: mol_type = other DNA
acagaattaaaggtcaaaaa

SEQ ID NO: 3168 - DNA, 20 bp, Arachis hypogaea
  source 1..20: mol_type = other DNA
tcatcgtgttatgcacaagt

SEQ ID NO: 3169 - DNA, 20 bp, Arachis hypogaea
  source 1..20: mol_type = other DNA
acaaattaaaaatgcaaaac

SEQ ID NO: 3170 - DNA, 20 bp, Arachis hypogaea
  source 1..20: mol_type = other DNA
caaattaaaaatgcaaaaca

SEQ ID NO: 3171 - DNA, 20 bp, Arachis hypogaea
  source 1..20: mol_type = other DNA
taatatcatatagtataaac

SEQ ID NO: 3172 - DNA, 20 bp, Arachis hypogaea
  source 1..20: mol_type = other DNA
gtaaattcttaactatatgt

SEQ ID NO: 3173 - DNA, 20 bp, Arachis hypogaea
  source 1..20: mol_type = other DNA
tcttatttttgttactttta

SEQ ID NO: 3174 - DNA, 20 bp, Arachis hypogaea
  source 1..20: mol_type = other DNA
ttaaaattagaaacattatg

SEQ ID NO: 3175 - DNA, 20 bp, Arachis hypogaea
  source 1..20: mol_type = other DNA
attaaaattagaaacattat

SEQ ID NO: 3176 - DNA, 20 bp, Arachis hypogaea
  source 1..20: mol_type = other DNA
cattaaaattagaaacatta

SEQ ID NO: 3177 - DNA, 20 bp, Arachis hypogaea
  source 1..20: mol_type = other DNA
tgaaaatcttaaaatcgatt

SEQ ID NO: 3178 - DNA, 20 bp, Arachis hypogaea
  source 1..20: mol_type = other DNA
ctagctaataaatgttgagt

SEQ ID NO: 3179 - DNA, 20 bp, Arachis hypogaea
  source 1..20: mol_type = other DNA
atttttaaaaaggtactact

SEQ ID NO: 3180 - DNA, 20 bp, Arachis hypogaea
  source 1..20: mol_type = other DNA
ggtgaaattaatttttaaaa

SEQ ID NO: 3181 - DNA, 20 bp, Arachis hypogaea
  source 1..20: mol_type = other DNA
ataaaggttggagcttttgt

SEQ ID NO: 3182 - DNA, 20 bp, Arachis hypogaea
  source 1..20: mol_type = other DNA
ctaaataccactataaaggt

SEQ ID NO: 3183 - DNA, 20 bp, Arachis hypogaea
  source 1..20: mol_type = other DNA
aaaagctccaacctttatag

SEQ ID NO: 3184 - DNA, 20 bp, Arachis hypogaea
  source 1..20: mol_type = other DNA
actactaaataccactataa

SEQ ID NO: 3185 - DNA, 20 bp, Arachis hypogaea
  source 1..20: mol_type = other DNA
tagtagttagtgtgtttatg

SEQ ID NO: 3186 - DNA, 20 bp, Arachis hypogaea
  source 1..20: mol_type = other DNA
tgtttatgaggttacaagag

SEQ ID NO: 3187 - DNA, 20 bp, Arachis hypogaea
  source 1..20: mol_type = other DNA
gtttatgaggttacaagaga

SEQ ID NO: 3188 - DNA, 20 bp, Arachis hypogaea
  source 1..20: mol_type = other DNA
acccaaaaggagcattggag

SEQ ID NO: 3189 - DNA, 20 bp, Arachis hypogaea
  source 1..20: mol_type = other DNA
ttcctacccaaaaggagcat

SEQ ID NO: 3190 - DNA, 20 bp, Arachis hypogaea
  source 1..20: mol_type = other DNA
ggccactccaatgctccttt

SEQ ID NO: 3191 - DNA, 20 bp, Arachis hypogaea
  source 1..20: mol_type = other DNA
gccactccaatgctcctttt

SEQ ID NO: 3192 - DNA, 20 bp, Arachis hypogaea
  source 1..20: mol_type = other DNA
cttatctcttcctacccaaa

SEQ ID NO: 3193 - DNA, 20 bp, Arachis hypogaea
  source 1..20: mol_type = other DNA
ctccaatgctccttttgggt

SEQ ID NO: 3194 - DNA, 20 bp, Arachis hypogaea
  source 1..20: mol_type = other DNA
gataagaaaattgaagagaa

SEQ ID NO: 3195 - DNA, 20 bp, Arachis hypogaea
  source 1..20: mol_type = other DNA
attcatgtttagtagtttgt

SEQ ID NO: 3196 - DNA, 20 bp, Arachis hypogaea
  source 1..20: mol_type = other DNA
ttagtagtttgttggtgtca

SEQ ID NO: 3197 - DNA, 20 bp, Arachis hypogaea
  source 1..20: mol_type = other DNA
ggtgtcatggtaaaaatcta

SEQ ID NO: 3198 - DNA, 20 bp, Arachis hypogaea
  source 1..20: mol_type = other DNA
atggcaatttgttataattg

SEQ ID NO: 3199 - DNA, 20 bp, Arachis hypogaea
  source 1..20: mol_type = other DNA
tggcaatttgttataattga

SEQ ID NO: 3200 - DNA, 20 bp, Arachis hypogaea
  source 1..20: mol_type = other DNA
aatttgttataattgaggga

SEQ ID NO: 3201 - DNA, 20 bp, Arachis hypogaea
  source 1..20: mol_type = other DNA
agggacggcatttccgagag

SEQ ID NO: 3202 - DNA, 20 bp, Arachis hypogaea
  source 1..20: mol_type = other DNA
gtatatgttattacctctct

SEQ ID NO: 3203 - DNA, 20 bp, Arachis hypogaea
  source 1..20: mol_type = other DNA
aggtaataacatatacagtg

SEQ ID NO: 3204 - DNA, 20 bp, Arachis hypogaea
  source 1..20: mol_type = other DNA
ctctgagcgagtactttatt

SEQ ID NO: 3205 - DNA, 20 bp, Arachis hypogaea
  source 1..20: mol_type = other DNA
tctgagcgagtactttatta

SEQ ID NO: 3206 - DNA, 20 bp, Arachis hypogaea
  source 1..20: mol_type = other DNA
agcgagtactttattagggt

SEQ ID NO: 3207 - DNA, 20 bp, Arachis hypogaea
  source 1..20: mol_type = other DNA
tgtgttcttttgcagttttg

SEQ ID NO: 3208 - DNA, 20 bp, Arachis hypogaea
  source 1..20: mol_type = other DNA
atgtgttcttttgcagtttt

SEQ ID NO: 3209 - DNA, 20 bp, Arachis hypogaea
  source 1..20: mol_type = other DNA
aatgtgttcttttgcagttt

SEQ ID NO: 3210 - DNA, 20 bp, Arachis hypogaea
  source 1..20: mol_type = other DNA
cacatgaaatgggtaaaaaa

SEQ ID NO: 3211 - DNA, 20 bp, Arachis hypogaea
  source 1..20: mol_type = other DNA
gtatgagtggcacatgaaat

SEQ ID NO: 3212 - DNA, 20 bp, Arachis hypogaea
  source 1..20: mol_type = other DNA
ggtatgagtggcacatgaaa

SEQ ID NO: 3213 - DNA, 20 bp, Arachis hypogaea
  source 1..20: mol_type = other DNA
ctgtagttgactggtatgag

SEQ ID NO: 3214 - DNA, 20 bp, Arachis hypogaea
  source 1..20: mol_type = other DNA
taacgcttactgtagttgac

SEQ ID NO: 3215 - DNA, 20 bp, Arachis hypogaea
  source 1..20: mol_type = other DNA
gtcaactacagtaagcgtta

SEQ ID NO: 3216 - DNA, 20 bp, Arachis hypogaea
  source 1..20: mol_type = other DNA
aattaagaatttctttaaaa

SEQ ID NO: 3217 - DNA, 20 bp, Arachis hypogaea
  source 1..20: mol_type = other DNA
taccaaccagaaaagaaaac

SEQ ID NO: 3218 - DNA, 20 bp, Arachis hypogaea
  source 1..20: mol_type = other DNA
atgtatcctgttttcttttc

SEQ ID NO: 3219 - DNA, 20 bp, Arachis hypogaea
  source 1..20: mol_type = other DNA
atcctgttttcttttctggt

SEQ ID NO: 3220 - DNA, 20 bp, Arachis hypogaea
  source 1..20: mol_type = other DNA
tttctggttggtaccgtctg

SEQ ID NO: 3221 - DNA, 20 bp, Arachis hypogaea
  source 1..20: mol_type = other DNA
tatcatatcatagccacaga

SEQ ID NO: 3222 - DNA, 20 bp, Arachis hypogaea
  source 1..20: mol_type = other DNA
tctgtggctatgatatgata

SEQ ID NO: 3223 - DNA, 20 bp, Arachis hypogaea
  source 1..20: mol_type = other DNA
tatgatatggaccaattatg

SEQ ID NO: 3224 - DNA, 20 bp, Arachis hypogaea
  source 1..20: mol_type = other DNA
atgctactcctccacataat

SEQ ID NO: 3225 - DNA, 20 bp, Arachis hypogaea
  source 1..20: mol_type = other DNA
gatatggaccaattatgtgg

SEQ ID NO: 3226 - DNA, 20 bp, Arachis hypogaea
  source 1..20: mol_type = other DNA
agcatttagattgcataatt

SEQ ID NO: 3227 - DNA, 20 bp, Arachis hypogaea
  source 1..20: mol_type = other DNA
gcatttagattgcataatta

SEQ ID NO: 3228 - DNA, 20 bp, Arachis hypogaea
  source 1..20: mol_type = other DNA
gttcttcaattaaataatta

SEQ ID NO: 3229 - DNA, 20 bp, Arachis hypogaea
  source 1..20: mol_type = other DNA
attgtgtcctatatctgaca

SEQ ID NO: 3230 - DNA, 20 bp, Arachis hypogaea
  source 1..20: mol_type = other DNA
tgaagaaccatgtcagatat

SEQ ID NO: 3231 - DNA, 20 bp, Arachis hypogaea
  source 1..20: mol_type = other DNA
aaaccaatagtggagcacac

SEQ ID NO: 3232 - DNA, 20 bp, Arachis hypogaea
  source 1..20: mol_type = other DNA
aaaaccaatagtggagcaca

SEQ ID NO: 3233 - DNA, 20 bp, Arachis hypogaea
  source 1..20: mol_type = other DNA
aatcccgtgtgctccactat

SEQ ID NO: 3234 - DNA, 20 bp, Arachis hypogaea
  source 1..20: mol_type = other DNA
tgtgtgtccaaaaccaatag

SEQ ID NO: 3235 - DNA, 20 bp, Arachis hypogaea
  source 1..20: mol_type = other DNA
gtgtgctccactattggttt

SEQ ID NO: 3236 - DNA, 20 bp, Arachis hypogaea
  source 1..20: mol_type = other DNA
attggttttggacacacact

SEQ ID NO: 3237 - DNA, 20 bp, Arachis hypogaea
  source 1..20: mol_type = other DNA
ggtcccgtccaaagtagata

SEQ ID NO: 3238 - DNA, 20 bp, Arachis hypogaea
  source 1..20: mol_type = other DNA
cggtcccgtccaaagtagat

SEQ ID NO: 3239 - DNA, 20 bp, Arachis hypogaea
  source 1..20: mol_type = other DNA
aggcaagtccctatctactt

SEQ ID NO: 3240 - DNA, 20 bp, Arachis hypogaea
  source 1..20: mol_type = other DNA
aagtccctatctactttgga

SEQ ID NO: 3241 - DNA, 20 bp, Arachis hypogaea
  source 1..20: mol_type = other DNA
agtccctatctactttggac

SEQ ID NO: 3242 - DNA, 20 bp, Arachis hypogaea
  source 1..20: mol_type = other DNA
ctatctactttggacgggac

SEQ ID NO: 3243 - DNA, 20 bp, Arachis hypogaea
  source 1..20: mol_type = other DNA
atcagagccaatggggtctc

SEQ ID NO: 3244 - DNA, 20 bp, Arachis hypogaea
  source 1..20: mol_type = other DNA
gacgggaccggagaccccat

SEQ ID NO: 3245 - DNA, 20 bp, Arachis hypogaea
  source 1..20: mol_type = other DNA
tttgtggatcagagccaatg

SEQ ID NO: 3246 - DNA, 20 bp, Arachis hypogaea
  source 1..20: mol_type = other DNA
ttttgtggatcagagccaat

SEQ ID NO: 3247 - DNA, 20 bp, Arachis hypogaea
  source 1..20: mol_type = other DNA
tttttgtggatcagagccaa

SEQ ID NO: 3248 - DNA, 20 bp, Arachis hypogaea
  source 1..20: mol_type = other DNA
aaatttggtgaatatttttg

SEQ ID NO: 3249 - DNA, 20 bp, Arachis hypogaea
  source 1..20: mol_type = other DNA
cactgcatgtgcaataaatt

SEQ ID NO: 3250 - DNA, 20 bp, Arachis hypogaea
  source 1..20: mol_type = other DNA
caaatttattgcacatgcag

SEQ ID NO: 3251 - DNA, 20 bp, Arachis hypogaea
  source 1..20: mol_type = other DNA
atattagcaattctctacaa

SEQ ID NO: 3252 - DNA, 20 bp, Arachis hypogaea
  source 1..20: mol_type = other DNA
cttccaaaagactacatgtt

SEQ ID NO: 3253 - DNA, 20 bp, Arachis hypogaea
  source 1..20: mol_type = other DNA
ttgcctaacatgtagtcttt

SEQ ID NO: 3254 - DNA, 20 bp, Arachis hypogaea
  source 1..20: mol_type = other DNA
ctaacatgtagtcttttgga

SEQ ID NO: 3255 - DNA, 20 bp, Arachis hypogaea
  source 1..20: mol_type = other DNA
gaaggtttattttgtatttg

SEQ ID NO: 3256 - DNA, 20 bp, Arachis hypogaea
  source 1..20: mol_type = other DNA
tattttttaaccgaaaaatc

SEQ ID NO: 3257 - DNA, 20 bp, Arachis hypogaea
  source 1..20: mol_type = other DNA
tgcatgcatgcctgattttt

SEQ ID NO: 3258 - DNA, 20 bp, Arachis hypogaea
  source 1..20: mol_type = other DNA
ctttttaggttataataatt

SEQ ID NO: 3259 - DNA, 20 bp, Arachis hypogaea
  source 1..20: mol_type = other DNA
tcagattgacaagtcttttt

SEQ ID NO: 3260 - DNA, 20 bp, Arachis hypogaea
  source 1..20: mol_type = other DNA
cacacaaattattatggtta

SEQ ID NO: 3261 - DNA, 20 bp, Arachis hypogaea
  source 1..20: mol_type = other DNA
atatgtcacacaaattatta

SEQ ID NO: 3262 - DNA, 20 bp, Arachis hypogaea
  source 1..20: mol_type = other DNA
gagtcatggcctttcaaagc

SEQ ID NO: 3263 - DNA, 20 bp, Arachis hypogaea
  source 1..20: mol_type = other DNA
tgacatatgcctgctttgaa

SEQ ID NO: 3264 - DNA, 20 bp, Arachis hypogaea
  source 1..20: mol_type = other DNA
aactttgcctgcatgagtca

SEQ ID NO: 3265 - DNA, 20 bp, Arachis hypogaea
  source 1..20: mol_type = other DNA
tgaaaggccatgactcatgc

SEQ ID NO: 3266 - DNA, 20 bp, Arachis hypogaea
  source 1..20: mol_type = other DNA
gactcatgcaggcaaagtta

SEQ ID NO: 3267 - DNA, 20 bp, Arachis hypogaea
  source 1..20: mol_type = other DNA
aatttctctttgatattacg

SEQ ID NO: 3268 - DNA, 20 bp, Arachis hypogaea
  source 1..20: mol_type = other DNA
aatttagacaaaaatttcat

SEQ ID NO: 3269 - DNA, 20 bp, Arachis hypogaea
  source 1..20: mol_type = other DNA
cttaaaagtaaagatagagt

SEQ ID NO: 3270 - DNA, 20 bp, Arachis hypogaea
  source 1..20: mol_type = other DNA
aaaagtaaagatagagtagg

SEQ ID NO: 3271 - DNA, 20 bp, Arachis hypogaea
  source 1..20: mol_type = other DNA
aaagtaaagatagagtaggt

SEQ ID NO: 3272 - DNA, 20 bp, Arachis hypogaea
  source 1..20: mol_type = other DNA
tacaaaattcaaaaataaaa

SEQ ID NO: 3273 - DNA, 20 bp, Arachis hypogaea
  source 1..20: mol_type = other DNA
ctacaaaattcaaaaataaa

SEQ ID NO: 3274 - DNA, 20 bp, Arachis hypogaea
  source 1..20: mol_type = other DNA
tatttttcttattagatgat

SEQ ID NO: 3275 - DNA, 20 bp, Arachis hypogaea
  source 1..20: mol_type = other DNA
acaaaagcagagcgtatcca

SEQ ID NO: 3276 - DNA, 20 bp, Arachis hypogaea
  source 1..20: mol_type = other DNA
gaaattggtacaagaagcca

SEQ ID NO: 3277 - DNA, 20 bp, Arachis hypogaea
  source 1..20: mol_type = other DNA
agtaatgtgccaggagaaat

SEQ ID NO: 3278 - DNA, 20 bp, Arachis hypogaea
  source 1..20: mol_type = other DNA
cttcttgtaccaatttctcc

SEQ ID NO: 3279 - DNA, 20 bp, Arachis hypogaea
  source 1..20: mol_type = other DNA
aagcgaattagtaatgtgcc

SEQ ID NO: 3280 - DNA, 20 bp, Arachis hypogaea
  source 1..20: mol_type = other DNA
tggcacattactaattcgct

SEQ ID NO: 3281 - DNA, 20 bp, Arachis hypogaea
  source 1..20: mol_type = other DNA
tttatcgaagagttatctat

SEQ ID NO: 3282 - DNA, 20 bp, Arachis hypogaea
  source 1..20: mol_type = other DNA
cccattattcaaatcgatgg

SEQ ID NO: 3283 - DNA, 20 bp, Arachis hypogaea
  source 1..20: mol_type = other DNA
acccattattcaaatcgatg

SEQ ID NO: 3284 - DNA, 20 bp, Arachis hypogaea
  source 1..20: mol_type = other DNA
gacccattattcaaatcgat

SEQ ID NO: 3285 - DNA, 20 bp, Arachis hypogaea
  source 1..20: mol_type = other DNA
agacccattattcaaatcga

SEQ ID NO: 3286 - DNA, 20 bp, Arachis hypogaea
  source 1..20: mol_type = other DNA
tcccccatcgatttgaataa

SEQ ID NO: 3287 - DNA, 20 bp, Arachis hypogaea
  source 1..20: mol_type = other DNA
cccccatcgatttgaataat

SEQ ID NO: 3288 - DNA, 20 bp, Arachis hypogaea
  source 1..20: mol_type = other DNA
ttgaataatgggtctcaatt

SEQ ID NO: 3289 - DNA, 20 bp, Arachis hypogaea
  source 1..20: mol_type = other DNA
tgaataatgggtctcaattc

SEQ ID NO: 3290 - DNA, 20 bp, Arachis hypogaea
  source 1..20: mol_type = other DNA
gaataatgggtctcaattcg

SEQ ID NO: 3291 - DNA, 20 bp, Arachis hypogaea
  source 1..20: mol_type = other DNA
aataatgggtctcaattcgg

SEQ ID NO: 3292 - DNA, 20 bp, Arachis hypogaea
  source 1..20: mol_type = other DNA
ataatgggtctcaattcggg

SEQ ID NO: 3293 - DNA, 20 bp, Arachis hypogaea
  source 1..20: mol_type = other DNA
ctcaattcggggggaagaac

SEQ ID NO: 3294 - DNA, 20 bp, Arachis hypogaea
  source 1..20: mol_type = other DNA
ctggtagcgcgaacgagaaa

SEQ ID NO: 3295 - DNA, 20 bp, Arachis hypogaea
  source 1..20: mol_type = other DNA
tttctcgttcgcgctaccag

SEQ ID NO: 3296 - DNA, 20 bp, Arachis hypogaea
  source 1..20: mol_type = other DNA
ataatggtctcgtgctccgc

SEQ ID NO: 3297 - DNA, 20 bp, Arachis hypogaea
  source 1..20: mol_type = other DNA
tagtcagagtattttgataa

SEQ ID NO: 3298 - DNA, 20 bp, Arachis hypogaea
  source 1..20: mol_type = other DNA
aaattatagaataaaaaaca

SEQ ID NO: 3299 - DNA, 20 bp, Arachis hypogaea
  source 1..20: mol_type = other DNA
gcaggaaattttatgatttt

SEQ ID NO: 3300 - DNA, 20 bp, Arachis hypogaea
  source 1..20: mol_type = other DNA
atggaaaggcgcaagattgc

SEQ ID NO: 3301 - DNA, 20 bp, Arachis hypogaea
  source 1..20: mol_type = other DNA
gaacacagaattatatggaa

SEQ ID NO: 3302 - DNA, 20 bp, Arachis hypogaea
  source 1..20: mol_type = other DNA
atcatgaacacagaattata

SEQ ID NO: 3303 - DNA, 20 bp, Arachis hypogaea
  source 1..20: mol_type = other DNA
atttttgtatttgtaaatgc

SEQ ID NO: 3304 - DNA, 20 bp, Arachis hypogaea
  source 1..20: mol_type = other DNA
tgtatttgtaaatgctggaa

SEQ ID NO: 3305 - DNA, 20 bp, Arachis hypogaea
  source 1..20: mol_type = other DNA
aggtgttttgcttttatttg

SEQ ID NO: 3306 - DNA, 20 bp, Arachis hypogaea
  source 1..20: mol_type = other DNA
ccaatcagtaagtaaaaaaa

SEQ ID NO: 3307 - DNA, 20 bp, Arachis hypogaea
  source 1..20: mol_type = other DNA
ccatttttttacttactgat

SEQ ID NO: 3308 - DNA, 20 bp, Arachis hypogaea
  source 1..20: mol_type = other DNA
catttttttacttactgatt

SEQ ID NO: 3309 - DNA, 20 bp, Arachis hypogaea
  source 1..20: mol_type = other DNA
ttttacttactgattgggaa

SEQ ID NO: 3310 - DNA, 20 bp, Arachis hypogaea
  source 1..20: mol_type = other DNA
ttatagtcgtcactgtttac

SEQ ID NO: 3311 - DNA, 20 bp, Arachis hypogaea
  source 1..20: mol_type = other DNA
tacacaagaacattattaac

SEQ ID NO: 3312 - DNA, 20 bp, Arachis hypogaea
  source 1..20: mol_type = other DNA
ctacacaagaacattattaa

SEQ ID NO: 3313 - DNA, 20 bp, Arachis hypogaea
  source 1..20: mol_type = other DNA
ttctgctttaaagaccacac

SEQ ID NO: 3314 - DNA, 20 bp, Arachis hypogaea
  source 1..20: mol_type = other DNA
ggacaatgtgtgtgcctgtg

SEQ ID NO: 3315 - DNA, 20 bp, Arachis hypogaea
  source 1..20: mol_type = other DNA
ttgtgcagaaagaatgagaa

SEQ ID NO: 3316 - DNA, 20 bp, Arachis hypogaea
  source 1..20: mol_type = other DNA
agatagtgctaaattttatt

SEQ ID NO: 3317 - DNA, 20 bp, Arachis hypogaea
  source 1..20: mol_type = other DNA
gatagtgctaaattttattc

SEQ ID NO: 3318 - DNA, 20 bp, Arachis hypogaea
  source 1..20: mol_type = other DNA
tgcgctgttatgttatgtac

SEQ ID NO: 3319 - DNA, 20 bp, Arachis hypogaea
  source 1..20: mol_type = other DNA
gttatgttatgtacaggttg

SEQ ID NO: 3320 - DNA, 20 bp, Arachis hypogaea
  source 1..20: mol_type = other DNA
ttatgttatgtacaggttgc

SEQ ID NO: 3321 - DNA, 20 bp, Arachis hypogaea
  source 1..20: mol_type = other DNA
atgtacaggttgcgggaaga

SEQ ID NO: 3322 - DNA, 20 bp, Arachis hypogaea
  source 1..20: mol_type = other DNA
tgtacaggttgcgggaagat

SEQ ID NO: 3323 - DNA, 20 bp, Arachis hypogaea
  source 1..20: mol_type = other DNA
ggttgcgggaagatgggagc

SEQ ID NO: 3324 - DNA, 20 bp, Arachis hypogaea
  source 1..20: mol_type = other DNA
tgcgggaagatgggagctgg

SEQ ID NO: 3325 - DNA, 20 bp, Arachis hypogaea
  source 1..20: mol_type = other DNA
ttgaaggaggaacagaggtt

SEQ ID NO: 3326 - DNA, 20 bp, Arachis hypogaea
  source 1..20: mol_type = other DNA
cctgtttgaaggaggaacag

SEQ ID NO: 3327 - DNA, 20 bp, Arachis hypogaea
  source 1..20: mol_type = other DNA
tcgaccgtcctgtttgaagg

SEQ ID NO: 3328 - DNA, 20 bp, Arachis hypogaea
  source 1..20: mol_type = other DNA
cctctgttcctccttcaaac

SEQ ID NO: 3329 - DNA, 20 bp, Arachis hypogaea
  source 1..20: mol_type = other DNA
gcctcgaccgtcctgtttga

SEQ ID NO: 3330 - DNA, 20 bp, Arachis hypogaea
  source 1..20: mol_type = other DNA
tgttcctccttcaaacagga

SEQ ID NO: 3331 - DNA, 20 bp, Arachis hypogaea
  source 1..20: mol_type = other DNA
tccttcaaacaggacggtcg

SEQ ID NO: 3332 - DNA, 20 bp, Arachis hypogaea
  source 1..20: mol_type = other DNA
ctgaagggaggtttttcatg

SEQ ID NO: 3333 - DNA, 20 bp, Arachis hypogaea
  source 1..20: mol_type = other DNA
acttggctgagactgaaggg

SEQ ID NO: 3334 - DNA, 20 bp, Arachis hypogaea
  source 1..20: mol_type = other DNA
ttgacttggctgagactgaa

SEQ ID NO: 3335 - DNA, 20 bp, Arachis hypogaea
  source 1..20: mol_type = other DNA
cttgacttggctgagactga

SEQ ID NO: 3336 - DNA, 20 bp, Arachis hypogaea
  source 1..20: mol_type = other DNA
gtgggatggccttcttgact

SEQ ID NO: 3337 - DNA, 20 bp, Arachis hypogaea
  source 1..20: mol_type = other DNA
cagtctcagccaagtcaaga

SEQ ID NO: 3338 - DNA, 20 bp, Arachis hypogaea
  source 1..20: mol_type = other DNA
ctgaaaacagtgaggtggga

SEQ ID NO: 3339 - DNA, 20 bp, Arachis hypogaea
  source 1..20: mol_type = other DNA
aacgctgaaaacagtgaggt

SEQ ID NO: 3340 - DNA, 20 bp, Arachis hypogaea
  source 1..20: mol_type = other DNA
gaacgctgaaaacagtgagg

SEQ ID NO: 3341 - DNA, 20 bp, Arachis hypogaea
  source 1..20: mol_type = other DNA
acagaacgctgaaaacagtg

SEQ ID NO: 3342 - DNA, 20 bp, Arachis hypogaea
  source 1..20: mol_type = other DNA
agacaacataggagaatgag

SEQ ID NO: 3343 - DNA, 20 bp, Arachis hypogaea
  source 1..20: mol_type = other DNA
ggtgagatcatagacaacat

SEQ ID NO: 3344 - DNA, 20 bp, Arachis hypogaea
  source 1..20: mol_type = other DNA
atagtagaggcaaaaggcta

SEQ ID NO: 3345 - DNA, 20 bp, Arachis hypogaea
  source 1..20: mol_type = other DNA
ggcggcatagtagaggcaaa

SEQ ID NO: 3346 - DNA, 20 bp, Arachis hypogaea
  source 1..20: mol_type = other DNA
aattggtggcggcatagtag

SEQ ID NO: 3347 - DNA, 20 bp, Arachis hypogaea
  source 1..20: mol_type = other DNA
tttgtggaagtaattggtgg

SEQ ID NO: 3348 - DNA, 20 bp, Arachis hypogaea
  source 1..20: mol_type = other DNA
gagtttgtggaagtaattgg

SEQ ID NO: 3349 - DNA, 20 bp, Arachis hypogaea
  source 1..20: mol_type = other DNA
agagagtttgtggaagtaat

SEQ ID NO: 3350 - DNA, 20 bp, Arachis hypogaea
  source 1..20: mol_type = other DNA
ataaaggggaagagagtttg

SEQ ID NO: 3351 - DNA, 20 bp, Arachis hypogaea
  source 1..20: mol_type = other DNA
ccaggccaagtaaaataaag

SEQ ID NO: 3352 - DNA, 20 bp, Arachis hypogaea
  source 1..20: mol_type = other DNA
gccaggccaagtaaaataaa

SEQ ID NO: 3353 - DNA, 20 bp, Arachis hypogaea
  source 1..20: mol_type = other DNA
agccaggccaagtaaaataa

SEQ ID NO: 3354 - DNA, 20 bp, Arachis hypogaea
  source 1..20: mol_type = other DNA
ctcttcccctttattttact

SEQ ID NO: 3355 - DNA, 20 bp, Arachis hypogaea
  source 1..20: mol_type = other DNA
cccctttattttacttggcc

SEQ ID NO: 3356 - DNA, 20 bp, Arachis hypogaea
  source 1..20: mol_type = other DNA
gacagccccatagagaagcc

SEQ ID NO: 3357 - DNA, 20 bp, Arachis hypogaea
  source 1..20: mol_type = other DNA
tacttggcctggcttctcta

SEQ ID NO: 3358 - DNA, 20 bp, Arachis hypogaea
  source 1..20: mol_type = other DNA
acttggcctggcttctctat

SEQ ID NO: 3359 - DNA, 20 bp, Arachis hypogaea
  source 1..20: mol_type = other DNA
cttggcctggcttctctatg

SEQ ID NO: 3360 - DNA, 20 bp, Arachis hypogaea
  source 1..20: mol_type = other DNA
cttctctatggggctgtcca

SEQ ID NO: 3361 - DNA, 20 bp, Arachis hypogaea
  source 1..20: mol_type = other DNA
caccggtaaggatgcaacct

SEQ ID NO: 3362 - DNA, 20 bp, Arachis hypogaea
  source 1..20: mol_type = other DNA
gtccaaggttgcatccttac

SEQ ID NO: 3363 - DNA, 20 bp, Arachis hypogaea
  source 1..20: mol_type = other DNA
cgatgacccaaacaccggta

SEQ ID NO: 3364 - DNA, 20 bp, Arachis hypogaea
  source 1..20: mol_type = other DNA
gttgcatccttaccggtgtt

SEQ ID NO: 3365 - DNA, 20 bp, Arachis hypogaea
  source 1..20: mol_type = other DNA
ttgcatccttaccggtgttt

SEQ ID NO: 3366 - DNA, 20 bp, Arachis hypogaea
  source 1..20: mol_type = other DNA
gtgcgcgatgacccaaacac

SEQ ID NO: 3367 - DNA, 20 bp, Arachis hypogaea
  source 1..20: mol_type = other DNA
tgggtcatcgcgcacgaatg

SEQ ID NO: 3368 - DNA, 20 bp, Arachis hypogaea
  source 1..20: mol_type = other DNA
gataatcactgaatgcatgg

SEQ ID NO: 3369 - DNA, 20 bp, Arachis hypogaea
  source 1..20: mol_type = other DNA
attgataatcactgaatgca

SEQ ID NO: 3370 - DNA, 20 bp, Arachis hypogaea
  source 1..20: mol_type = other DNA
atgcattcagtgattatcaa

SEQ ID NO: 3371 - DNA, 20 bp, Arachis hypogaea
  source 1..20: mol_type = other DNA
caatggcttgatgatacagt

SEQ ID NO: 3372 - DNA, 20 bp, Arachis hypogaea
  source 1..20: mol_type = other DNA
agaggccagagtggagaaca

SEQ ID NO: 3373 - DNA, 20 bp, Arachis hypogaea
  source 1..20: mol_type = other DNA
gttggccttgttctccactc

SEQ ID NO: 3374 - DNA, 20 bp, Arachis hypogaea
  source 1..20: mol_type = other DNA
aagggaccaagaggccagag

SEQ ID NO: 3375 - DNA, 20 bp, Arachis hypogaea
  source 1..20: mol_type = other DNA
tgttctccactctggcctct

SEQ ID NO: 3376 - DNA, 20 bp, Arachis hypogaea
  source 1..20: mol_type = other DNA
atgaaaagtaagggaccaag

SEQ ID NO: 3377 - DNA, 20 bp, Arachis hypogaea
  source 1..20: mol_type = other DNA
tgtatttccatgaaaagtaa

SEQ ID NO: 3378 - DNA, 20 bp, Arachis hypogaea
  source 1..20: mol_type = other DNA
ctgtatttccatgaaaagta

SEQ ID NO: 3379 - DNA, 20 bp, Arachis hypogaea
  source 1..20: mol_type = other DNA
tcttggtcccttacttttca

SEQ ID NO: 3380 - DNA, 20 bp, Arachis hypogaea
  source 1..20: mol_type = other DNA
tgttggagtggtggcgacgg

SEQ ID NO: 3381 - DNA, 20 bp, Arachis hypogaea
  source 1..20: mol_type = other DNA
cggtgttggagtggtggcga

SEQ ID NO: 3382 - DNA, 20 bp, Arachis hypogaea
  source 1..20: mol_type = other DNA
gggaaccggtgttggagtgg

SEQ ID NO: 3383 - DNA, 20 bp, Arachis hypogaea
  source 1..20: mol_type = other DNA
caagggaaccggtgttggag

SEQ ID NO: 3384 - DNA, 20 bp, Arachis hypogaea
  source 1..20: mol_type = other DNA
cgtcgccaccactccaacac

SEQ ID NO: 3385 - DNA, 20 bp, Arachis hypogaea
  source 1..20: mol_type = other DNA
cctgtcaagggaaccggtgt

SEQ ID NO: 3386 - DNA, 20 bp, Arachis hypogaea
  source 1..20: mol_type = other DNA
ttcatccctgtcaagggaac

SEQ ID NO: 3387 - DNA, 20 bp, Arachis hypogaea
  source 1..20: mol_type = other DNA
ccaacaccggttcccttgac

SEQ ID NO: 3388 - DNA, 20 bp, Arachis hypogaea
  source 1..20: mol_type = other DNA
caacaccggttcccttgaca

SEQ ID NO: 3389 - DNA, 20 bp, Arachis hypogaea
  source 1..20: mol_type = other DNA
aaagacttcatccctgtcaa

SEQ ID NO: 3390 - DNA, 20 bp, Arachis hypogaea
  source 1..20: mol_type = other DNA
caaagacttcatccctgtca

SEQ ID NO: 3391 - DNA, 20 bp, Arachis hypogaea
  source 1..20: mol_type = other DNA
gcaatactagacttcttctt

SEQ ID NO: 3392 - DNA, 20 bp, Arachis hypogaea
  source 1..20: mol_type = other DNA
agaagaagtctagtattgca

SEQ ID NO: 3393 - DNA, 20 bp, Arachis hypogaea
  source 1..20: mol_type = other DNA
agaagtctagtattgcatgg

SEQ ID NO: 3394 - DNA, 20 bp, Arachis hypogaea
  source 1..20: mol_type = other DNA
ctcttcctagtgggttatta

SEQ ID NO: 3395 - DNA, 20 bp, Arachis hypogaea
  source 1..20: mol_type = other DNA
aagtaccttaataacccact

SEQ ID NO: 3396 - DNA, 20 bp, Arachis hypogaea
  source 1..20: mol_type = other DNA
gtgtgaggactcttcctagt

SEQ ID NO: 3397 - DNA, 20 bp, Arachis hypogaea
  source 1..20: mol_type = other DNA
agtgtgaggactcttcctag

SEQ ID NO: 3398 - DNA, 20 bp, Arachis hypogaea
  source 1..20: mol_type = other DNA
tgagggtaatagtgagtgtg

SEQ ID NO: 3399 - DNA, 20 bp, Arachis hypogaea
  source 1..20: mol_type = other DNA
aagtggccaaccaagggtga

SEQ ID NO: 3400 - DNA, 20 bp, Arachis hypogaea
  source 1..20: mol_type = other DNA
ctcactattaccctcaccct

SEQ ID NO: 3401 - DNA, 20 bp, Arachis hypogaea
  source 1..20: mol_type = other DNA
aaagtggccaaccaagggtg

SEQ ID NO: 3402 - DNA, 20 bp, Arachis hypogaea
  source 1..20: mol_type = other DNA
ctattaccctcacccttggt

SEQ ID NO: 3403 - DNA, 20 bp, Arachis hypogaea
  source 1..20: mol_type = other DNA
caagtaaagtggccaaccaa

SEQ ID NO: 3404 - DNA, 20 bp, Arachis hypogaea
  source 1..20: mol_type = other DNA
ccaagtaaagtggccaacca

SEQ ID NO: 3405 - DNA, 20 bp, Arachis hypogaea
  source 1..20: mol_type = other DNA
acattaaaagccaagtaaag

SEQ ID NO: 3406 - DNA, 20 bp, Arachis hypogaea
  source 1..20: mol_type = other DNA
ccttggttggccactttact

SEQ ID NO: 3407 - DNA, 20 bp, Arachis hypogaea
  source 1..20: mol_type = other DNA
ttacttggcttttaatgtct

SEQ ID NO: 3408 - DNA, 20 bp, Arachis hypogaea
  source 1..20: mol_type = other DNA
tacttggcttttaatgtctc

SEQ ID NO: 3409 - DNA, 20 bp, Arachis hypogaea
  source 1..20: mol_type = other DNA
tggcttttaatgtctcggga

SEQ ID NO: 3410 - DNA, 8742 bp, Arachis hypogaea
  source 1..8742: mol_type = genomic DNA
tgctataaatataatattaatttttttgtttaataaatatttttatcaacgtttataaaattcatgatactcactattgtttttccttttttaattcatcaaacacatcttacatactctcctctcttctttgtcctcgcaaactggaaaccctgacacaggatacatagccacaattttcaagctactctctcgtttgaaggttttaaattattctccaaagtaattgcttgtaaatattataatatttacatgttggtcttatatttttcattaattttattatattttattctcatcctataagttgtaaataaaattaaataaaataaaaatcaaatcaaatttctttaatatactgggtatgtatatctatgcaaatataacatattttaaatatacttagaatgtatttttttttaatgttacacattttaagtgcatagtatttaatttcagtatttatttgtttttcattcttgtatatttgagatatgcaatgatactataaaaatgtaaatagatttagtaatatgtatattaataaaataaaataattttatttataaataaaaaatatctcgtggaaaaaagaccgttcatttattcacaactcacaagtaattgcgctcgcaataacttgtcaattttaggtagccataggccatacctaatctacttagcaattattagattttgaaaggagtctttcgtataaatcatatatcccccaaaacaaaatgataactaaaacagtaaaactatgagtcttactgaaattgaaattcttatccaatttatcggcgtcggaattggtattcccgaaaattagcattattttctctacgttttccttttttgttcgaaagagggagtgtcttgggcttcactgtgggccaagttaatgtataaaaactagtaagaaaaaaaaaacaaacatagctattactaacgtaaaagaaaaccatgaccaaaaaaaaaaaaacgtaaaagaaaacaaatacataatataatattacataattaaatataaatataaaattattttatatttataacgtatcaaaattaaatttataatttaattttaattttttcacgataaggtctaaaagtttgtccacgaataatttatacacctatatattatagtaaaaattataatatttaaaacaagagtatagctaaatctggcccatttaaaatttttatacattttctaatcactaattatatttgtgtttattgtgtgatggaaatgtaatcgaaaaaaatgcgattggcaaagcccctaatggaaaaacgtatacgttgctaatctacgggttagtttggatagttttttttaatgatttaaatactcattttatttatgtatctcaaaaaaaattctaattaattattatattttccttaattattatcactgatcaagtaataatacaaatttccaaaaagtattttggcaaatgacaattccctttcagaaatacatactataaataaaacatgcatgattgaaatttattctttgataatttgcaataatttattatataaacaaataaattttataaaaatattcaaatataatattatctatgaaaacataattcttgagaaccaatgtttttttttttaattttaaagttttcactcatctaaagcgtctcaatcttagaaagattaattaattatggaaacttgatcggtgacacccaataaataaattgttgaaaattttagaacgaaacattgttcacgacatgggtaggtggcaagtaccttagcattctgacaccgaaatattgagtaaaataaaaaatgaaaagagaggcaaataataataataaataatacaaacactagttaatgaacttactaggtagaataatagttgtttccgattaaaaataaataaataaaagaatgggatccgtatgtaggagggagaaggaggaggagtggtcacgtgatggagggaagcagatattttgggttgagtgagggagtcaccgtaataaaatacgattatattacgtgtacactgtactctgaaattaattattaatataaaatatataataacatataaatatatattaaaaataaattaaattatacatatatttatatataaatatattaataactaattttaatgtgttaataaccttctccataaaacaagagaggggtggctaatatacatgattcataattcatcacaacacaccttactctcctctattctctgtcctctcaaactgggaaaaaccctcacacaggatacacacccacaattttcagggtactctttcattttagggttttaaattattctccaaaataattactcataaatattatatttacatgttggtcttatattttaaaagaatatctccaaacttcagtattttcattaattttattatattttattgtcatccgtaaataacataacatattgtctcctgacaatcatatcaagaacataaatacgcttctcaatagttaatgtattttattcactttataattaataatagttaaatgtattattattatttaaagatgattcgaatctcatttttaataaatattcttattttaaaagagtcaaaatttatgagcttagttttaattgataaaaacataaattttacttataaaaaatattatttatacattaaaattaattattatatatttatatataaatatatataaaatttaatttattttaatatatattttacattttaatatatattctattttaatagctggtttttggcttaattattcatcttattatacaatttcagcagtcaaaacaagacatatttaatattaccatgattaattttaagaagaatattataacttattaataataaaaaaatgtatagtagtagtacattagttagtaatatatggtgcggtggggcccatataacagtggatggacggaaagtgcaaatggaggagtatcacaattttacgcttaaatactccttctttgcgccccatacccctctgcccccttctctcatttcctcacaccttcttcatttgccgccacacacattcctcctcctccgtcacaccttctcctccatccaggtacacctccttcttcctctttctcctcaattcaattcaatgccatgctacctgcttattaatcaatcgcacttcacgctttttcttccgcactcgcctagatctaactaaccttttcattggatgccatagatctcttcgttcattaattcattagatgtggtggtaatttctgattcagtagggtccattgtgttacataattgaagcattcataatcccccttacctccctccttgctttcctcatgtcttattttttatttccgtaacaagaatgtgttatctctgaggtgtttttttcattatttgcatctctttcctctttctctttcatcgtagcatcacaaaattatttaaccaattctgtctccacttgtttgtctctttccaagcaacgattctttcagtcgtattttactatttttttataaggataaataaattcaaataaataaattaaataaaatatgtttgtatgtgcattttttttcttttttaacgtgcggctatgagcatatttaggtaaggttctctcggatctaagcaacaacctgacctttccggattttttgtacggtttctcgctccgttctccaacaaaatagcccaaacccttttctttattcatttccatatattattttggctaattctatggtggctctgaaccggtacctaaattttgtctaacttatttgttgtagtaaattttgattttttaaaaattatttattattatattttttaaattaaatattattttttaattttttttaataaatagacactatcttttaaacatcatagcattcacctattattttaccctaattattctaatttagggactaatcttttggcaagaaaattaaaaaataacgtggcacgcagatctcgttgaaatattatatcaattgattgattcgtctttgatgtgcactcgtgatttttattttatgtattatttttttttctctaggtggagatattttttatattactgtagtattctatgtccaatttggactaattggttggtaagatgtgtgtgtgttttgattctatgatcctagttgggtttacaactcacaaatagccaatgctaggaaagctttaattaacgaaattacccttattggtttagaaagatcatttccaaccgacgtcaacttgcgcacttctattataggctaaaatcgtcacttgacttcaaaagaaaagtttagagtagacagaattaaaggtcaaaaaaaggacgcgttacaagttttcatcgtgttatgcactaagtttgaataaattaaaaatgcaaaacagggactaaatctttaaaatgagtaaaatgagactccgctttatactatgatattattatatatttgctaacatatagttaagaatttacatctaatgtttcttcttatttttgttacttttacggtcaccccatctaatgtttctattttttaatgtttgattctttgaaaatcttaaaatcgatttggttaaaagtgttacaacttacaagtatattaattaaatgagtttaaagctttttttttaatattttaatgaatagtccaactcaacatttattagctagtagtacctttttagtttttaaaaattaatttcaccaacaaaagctccaacctttatagtggtatttagtagttagtatgtttatgaggttacaagagagggccactccaatgctccttttgggtaggaagagagaagaaaattgaagagaatggaaaaagagaaaataactactatataaaatgacagattcatgtttagtagtttgttggtgtcatggtaaaaatctatggcaatttattataattgagggacggcatttccgagagaggtaataacatatacagtgaggtcactctgagcgagtactttattagggtcggctgattccccaaaactgcaaaagaacacatttcagagttagctccttttttttacccatttcatgtgccactcctaccagtcaactacagtaagcgttgaggaactttttatatgagataatttttatgggagctactcaaatgaagatgcaaaaaacatctttttatgaagatgctttgtataaaagtgtgatttattgatttggccacacttcaaataaaaacaacacttttataacatatcaaaatctaaccctacactccatcatctaagggtcaaaaagaaaaatcatcacatgaagacaattataatatcttcatgggagtacccaccaatttttataacctcttttaagaaaagtatttcttaattttgttgaaatactagaaagagtaacatgaataacttctataacaaatttttgttgttaaaatgtttattgtattctcaaataaactgaaacaaatgtatcctgttttcttttctggttggtaccgtctgtggctatgatatgatatggaccaattatgtggaggagtagcatttagattgcataattagggcgtacttgaaatgttgaataaattgaaagatgagcctgcaagattgcaacttgcatagcatgcaaagccataattatttaattgaagaaccatgtcagatataggacacaatgtagctatagtcatgtgcattagttgatgttgaaatcccgtgtgctccactattggttttggacacacactaggcaagtccctatctactttggacgggaccggagaccccattggctctgatccacaaaaatattcaccaaatttattgcacatgcagtggtccattgtagagaattgctaatatataatgttgcgtaacatgtagtcttttggaaggtttattttgtatgtggctcttatgacattattcagtttaactgcatgcatgcctgatttttcggttaaaaaataatcttaataatcctaattattataacctaaaagacttgtcaatctgatgtgtagtttagttgttgacattaatgatgtattcttgtgtatgtctagtttttttaaaccttaaccttaacaatttgtgtgacatattcctgctttgaaaggccatgactcatgcaggcaaagttatggcagcctcgtaatatcaaagagaaattctttggtgcctatgaaatttttgtctaaattgcttaaaagtaaagaatagagtaggtgggatctacccttttatttttgaatcttgcgagttaaatttaggcacgagaccattatcaaaatactctgactagtgcaagctcatatccatgttttttattcgataattttctttccttttctatattttcaactgacgactttgtatcaagttaattaacttgaccaaaaatcataaaatttcctgcaaccttgcccctttccatataattctgtgttcatgatgaaagtctatataatttttgtatttgtaaatgctggaaaggtgttttgcttttagtttgagtttttcaccatttttttactttaacttttcattgagtttgcctttatgtactatgtatgttatgtattatagcggttatagcacggactgtaatcctttccccttactgagtgagaaaggaaatgaaaattaacgaacctgtaaacagtgatgactataatatcctgttaataatgttcttgtatagtgtttaattaattatctgtttctgctttagagaccacacacattttccattctcattctttctgcacaaatcaaataaaagtattagctcatatctttcttcagatagtgctaaattttattcgggtacaattaaattttgattaatgctaataagaaacaaatgcactgttatgttatgtacaggttgcgggaagatgggagctggcggccgaacctctgttcctccttcaaacaggacggtcgaggctgactatgcgaagcgagttccgcatgaaaaacctcccttcagtctcagccaagtcaagaaggccatcccacctcactgttttcagcgttctgttatccgctcattctcctatgttgtctatgatctcaccatagccttttgcctctactatgccgccaccaattacttccacaaactctcttcccctttattttacttggcctggcttctctacggggctgtccaaggttgcatccttaccggtgtttgggtcatcgcacacgaatgtggccaccatgcattcagtgattatcaatggcttgatgatacggttggccttgttctccactctggcctcttggtcccttacttttcatggaaatacagccaccgtcgccaccactccaacaccggttcccttgacagggatgaagtctttgtgccaaagaaaaggtctagtattgcatggtggtctaagtaccttaataacccactaggaagagtgctcacactcactattaccctcacccttggttggccactttacttggcttttaatgtctcgggaaggccttatgataggtttgcttgccactatgacccatatggtccaatctactccgatcgcgaacgacttcaaatatacatatcagatgctggagtgcttgcagtttcctatggtcttattcgtcttgtcctggcaaaaggccttgcctgggttgtggctgtttatggtgttccattgctagtggtcaatggattcttggtgttgatcacatatttgcagcacactcaccctgcattgccacattacgattcatccgagtgggactggttgaggggagcattggcgaccgtggacagagactatggaatcctgaacaaggtcttccataacatcactgacacacatgtggcacatcacttgttctccacaatgccgcattaccatgcaatggaggctacaaatgcaataaaaccaattttgggagagtattatcggttcgatgggactccattttacaaggcaatgtggagagaggcgaaagagtgtctctatgttgagtcggatcagggtgctcagaataaaggtgtattctggtacaacaataagttgtgatgactagagctgctgtccaagttgtggtgtgtttggtcggaaaagttgtttagtttaaagtttccattctgccaattaggatggttgattattgggaataattctattgaaccctgatattggtagttaaaagtagttttatagtttgcttgattgcagaataagacatggcatgtgttaaacagttagattattgcccaatggtttcaaattggtgcatgtcaactgtgtgttagttcttattctggttgaagcttgttcttattttgtcactcatggcttttgattccaagtcattagtagtatatattgttggaagattttcaagtgtaccgtcataccggtatatcagtgatttttaaccgttgatcttaattatatatatattatatatattttttataattaagatcaacgattaaaaatcacagaaacaccggtacgacggcacacttcaaaattttcctatattctgttaatggtgcaaaattatggaccactgtctgtaacaatttgtattggtattctactgctagttaaaattcttaggagagtagtgtagacgtggatgggtatgttgaagaatcgtatcatggtaataaaataatataatgtgcctttcactttatcattaa

SEQ ID NO: 3411 - protein, 383 aa, Arachis hypogaea
MGAGGRTSVPPSNRTVEADYAKRVPHEKPPFSLSQVKKAIPPHCFQRSVIRSFSYVVYDLTIAFCLYYAATNYFHKLSSPLFYLAWLLYGAVQGCILTGVWVIAHECGHHAFSDYQWLDDTVGLVLHSGLLVPYFSWKYSHRRHHSNTGSLDRDEVFVPKKRSSIAWWSKYLNNPLGRVLTLTITLTLGWPLYLAFNVSGRPYDRFACHYDPYGPIYSDRERLQIYISDAGVLAVSYGLIRLVLAKGLAWVVAVYGVPLLVVNGFLVLITYLQHTHPALPHYDSSEWDWLRGALATVDRDYGILNKVFHNITDTHVAHHLFSTMPHYHAMEATNAIKPILGEYYRFDGTPFYKAMWREAKECLYVESDQGAQNKGVFWYNNKL

SEQ ID NO: 3412 - DNA, 20 bp, Arachis hypogaea
  source 1..20: mol_type = other DNA
aggggtatggggcgcaaaga

SEQ ID NO: 3413 - DNA, 20 bp, Arachis hypogaea
  source 1..20: mol_type = other DNA
gaagggggcagaggggtatg

SEQ ID NO: 3414 - DNA, 20 bp, Arachis hypogaea
  source 1..20: mol_type = other DNA
agaagggggcagaggggtat

SEQ ID NO: 3415 - DNA, 20 bp, Arachis hypogaea
  source 1..20: mol_type = other DNA
gagaagggggcagaggggta

SEQ ID NO: 3416 - DNA, 20 bp, Arachis hypogaea
  source 1..20: mol_type = other DNA
aatgagagaagggggcagag

SEQ ID NO: 3417 - DNA, 20 bp, Arachis hypogaea
  source 1..20: mol_type = other DNA
aaatgagagaagggggcaga

SEQ ID NO: 3418 - DNA, 20 bp, Arachis hypogaea
  source 1..20: mol_type = other DNA
gaaatgagagaagggggcag

SEQ ID NO: 3419 - DNA, 20 bp, Arachis hypogaea
  source 1..20: mol_type = other DNA
tgtgaggaaatgagagaagg

SEQ ID NO: 3420 - DNA, 20 bp, Arachis hypogaea
  source 1..20: mol_type = other DNA
gtgtgaggaaatgagagaag

SEQ ID NO: 3421 - DNA, 20 bp, Arachis hypogaea
  source 1..20: mol_type = other DNA
ggtgtgaggaaatgagagaa

SEQ ID NO: 3422 - DNA, 20 bp, Arachis hypogaea
  source 1..20: mol_type = other DNA
aggtgtgaggaaatgagaga

SEQ ID NO: 3423 - DNA, 20 bp, Arachis hypogaea
  source 1..20: mol_type = other DNA
cggcaaatgaagaaggtgtg

SEQ ID NO: 3424 - DNA, 20 bp, Arachis hypogaea
  source 1..20: mol_type = other DNA
tgtgtggcggcaaatgaaga

SEQ ID NO: 3425 - DNA, 20 bp, Arachis hypogaea
  source 1..20: mol_type = other DNA
aggaggaggaatgtgtgtgg

SEQ ID NO: 3426 - DNA, 20 bp, Arachis hypogaea
  source 1..20: mol_type = other DNA
cggaggaggaggaatgtgtg

SEQ ID NO: 3427 - DNA, 20 bp, Arachis hypogaea
  source 1..20: mol_type = other DNA
agaaggtgtgacggaggagg

SEQ ID NO: 3428 - DNA, 20 bp, Arachis hypogaea
  source 1..20: mol_type = other DNA
aggagaaggtgtgacggagg

SEQ ID NO: 3429 - DNA, 20 bp, Arachis hypogaea
  source 1..20: mol_type = other DNA
tggaggagaaggtgtgacgg

SEQ ID NO: 3430 - DNA, 20 bp, Arachis hypogaea
  source 1..20: mol_type = other DNA
ggatggaggagaaggtgtga

SEQ ID NO: 3431 - DNA, 20 bp, Arachis hypogaea
  source 1..20: mol_type = other DNA
gtgtacctggatggaggaga

SEQ ID NO: 3432 - DNA, 20 bp, Arachis hypogaea
  source 1..20: mol_type = other DNA
tcacaccttctcctccatcc

SEQ ID NO: 3433 - DNA, 20 bp, Arachis hypogaea
  source 1..20: mol_type = other DNA
aaggaggtgtacctggatgg

SEQ ID NO: 3434 - DNA, 20 bp, Arachis hypogaea
  source 1..20: mol_type = other DNA
aagaaggaggtgtacctgga

SEQ ID NO: 3435 - DNA, 20 bp, Arachis hypogaea
  source 1..20: mol_type = other DNA
gaggaagaaggaggtgtacc

SEQ ID NO: 3436 - DNA, 20 bp, Arachis hypogaea
  source 1..20: mol_type = other DNA
gaggagaaagaggaagaagg

SEQ ID NO: 3437 - DNA, 20 bp, Arachis hypogaea
  source 1..20: mol_type = other DNA
attgaggagaaagaggaaga

SEQ ID NO: 3438 - DNA, 20 bp, Arachis hypogaea
  source 1..20: mol_type = other DNA
gaattgaattgaggagaaag

SEQ ID NO: 3439 - DNA, 20 bp, Arachis hypogaea
  source 1..20: mol_type = other DNA
catggcattgaattgaattg

SEQ ID NO: 3440 - DNA, 20 bp, Arachis hypogaea
  source 1..20: mol_type = other DNA
tgattaataagcaggtagca

SEQ ID NO: 3441 - DNA, 20 bp, Arachis hypogaea
  source 1..20: mol_type = other DNA
agtgcgattgattaataagc

SEQ ID NO: 3442 - DNA, 20 bp, Arachis hypogaea
  source 1..20: mol_type = other DNA
tagttagatctaggcgagtg

SEQ ID NO: 3443 - DNA, 20 bp, Arachis hypogaea
  source 1..20: mol_type = other DNA
tgaaaaggttagttagatct

SEQ ID NO: 3444 - DNA, 20 bp, Arachis hypogaea
  source 1..20: mol_type = other DNA
gatctaactaaccttttcat

SEQ ID NO: 3445 - DNA, 20 bp, Arachis hypogaea
  source 1..20: mol_type = other DNA
atctatggcatccaatgaaa

SEQ ID NO: 3446 - DNA, 20 bp, Arachis hypogaea
  source 1..20: mol_type = other DNA
ttaatgaacgaagagatcta

SEQ ID NO: 3447 - DNA, 20 bp, Arachis hypogaea
  source 1..20: mol_type = other DNA
gttcattaattcattagatg

SEQ ID NO: 3448 - DNA, 20 bp, Arachis hypogaea
  source 1..20: mol_type = other DNA
cattaattcattagatgtgg

SEQ ID NO: 3449 - DNA, 20 bp, Arachis hypogaea
  source 1..20: mol_type = other DNA
gtggtaatttctgattcagt

SEQ ID NO: 3450 - DNA, 20 bp, Arachis hypogaea
  source 1..20: mol_type = other DNA
tggtaatttctgattcagta

SEQ ID NO: 3451 - DNA, 20 bp, Arachis hypogaea
  source 1..20: mol_type = other DNA
gcttcaattatgtaacacaa

SEQ ID NO: 3452 - DNA, 20 bp, Arachis hypogaea
  source 1..20: mol_type = other DNA
aagcaaggagggaggtaagg

SEQ ID NO: 3453 - DNA, 20 bp, Arachis hypogaea
  source 1..20: mol_type = other DNA
aaagcaaggagggaggtaag

SEQ ID NO: 3454 - DNA, 20 bp, Arachis hypogaea
  source 1..20: mol_type = other DNA
gaaagcaaggagggaggtaa

SEQ ID NO: 3455 - DNA, 20 bp, Arachis hypogaea
  source 1..20: mol_type = other DNA
ggaaagcaaggagggaggta

SEQ ID NO: 3456 - DNA, 20 bp, Arachis hypogaea
  source 1..20: mol_type = other DNA
catgaggaaagcaaggaggg

SEQ ID NO: 3457 - DNA, 20 bp, Arachis hypogaea
  source 1..20: mol_type = other DNA
agacatgaggaaagcaagga

SEQ ID NO: 3458 - DNA, 20 bp, Arachis hypogaea
  source 1..20: mol_type = other DNA
aagacatgaggaaagcaagg

SEQ ID NO: 3459 - DNA, 20 bp, Arachis hypogaea
  source 1..20: mol_type = other DNA
aataagacatgaggaaagca

SEQ ID NO: 3460 - DNA, 20 bp, Arachis hypogaea
  source 1..20: mol_type = other DNA
gaaataaaaaataagacatg

SEQ ID NO: 3461 - DNA, 20 bp, Arachis hypogaea
  source 1..20: mol_type = other DNA
gagataacacattcttgtta

SEQ ID NO: 3462 - DNA, 20 bp, Arachis hypogaea
  source 1..20: mol_type = other DNA
acaagaatgtgttatctctg

SEQ ID NO: 3463 - DNA, 20 bp, Arachis hypogaea
  source 1..20: mol_type = other DNA
tgctacgatgaaagagaaag

SEQ ID NO: 3464 - DNA, 20 bp, Arachis hypogaea
  source 1..20: mol_type = other DNA
caaacaagtggagacagaat

SEQ ID NO: 3465 - DNA, 20 bp, Arachis hypogaea
  source 1..20: mol_type = other DNA
cttggaaagagacaaacaag

SEQ ID NO: 3466 - DNA, 20 bp, Arachis hypogaea
  source 1..20: mol_type = other DNA
cgactgaaagaatcgttgct

SEQ ID NO: 3467 - DNA, 20 bp, Arachis hypogaea
  source 1..20: mol_type = other DNA
tattttactatttttttata

SEQ ID NO: 3468 - DNA, 20 bp, Arachis hypogaea
  source 1..20: mol_type = other DNA
tttttttcttttttaacgtg

SEQ ID NO: 3469 - DNA, 20 bp, Arachis hypogaea
  source 1..20: mol_type = other DNA
gtgcggctatgagcatattt

SEQ ID NO: 3470 - DNA, 20 bp, Arachis hypogaea
  source 1..20: mol_type = other DNA
gctatgagcatatttaggta

SEQ ID NO: 3471 - DNA, 20 bp, Arachis hypogaea
  source 1..20: mol_type = other DNA
atatttaggtaaggttctct

SEQ ID NO: 3472 - DNA, 20 bp, Arachis hypogaea
  source 1..20: mol_type = other DNA
acaaaaaatccggaaaggtc

SEQ ID NO: 3473 - DNA, 20 bp, Arachis hypogaea
  source 1..20: mol_type = other DNA
aagcaacaacctgacctttc

SEQ ID NO: 3474 - DNA, 20 bp, Arachis hypogaea
  source 1..20: mol_type = other DNA
accgtacaaaaaatccggaa

SEQ ID NO: 3475 - DNA, 20 bp, Arachis hypogaea
  source 1..20: mol_type = other DNA
gagaaaccgtacaaaaaatc

SEQ ID NO: 3476 - DNA, 20 bp, Arachis hypogaea
  source 1..20: mol_type = other DNA
acctttccggattttttgta

SEQ ID NO: 3477 - DNA, 20 bp, Arachis hypogaea
  source 1..20: mol_type = other DNA
tgggctattttgttggagaa

SEQ ID NO: 3478 - DNA, 20 bp, Arachis hypogaea
  source 1..20: mol_type = other DNA
aagggtttgggctattttgt

SEQ ID NO: 3479 - DNA, 20 bp, Arachis hypogaea
  source 1..20: mol_type = other DNA
atgaataaagaaaagggttt

SEQ ID NO: 3480 - DNA, 20 bp, Arachis hypogaea
  source 1..20: mol_type = other DNA
aatgaataaagaaaagggtt

SEQ ID NO: 3481 - DNA, 20 bp, Arachis hypogaea
  source 1..20: mol_type = other DNA
atggaaatgaataaagaaaa

SEQ ID NO: 3482 - DNA, 20 bp, Arachis hypogaea
  source 1..20: mol_type = other DNA
tatggaaatgaataaagaaa

SEQ ID NO: 3483 - DNA, 20 bp, Arachis hypogaea
  source 1..20: mol_type = other DNA
gaattagccaaaataatata

SEQ ID NO: 3484 - DNA, 20 bp, Arachis hypogaea
  source 1..20: mol_type = other DNA
ttcatttccatatattattt

SEQ ID NO: 3485 - DNA, 20 bp, Arachis hypogaea
  source 1..20: mol_type = other DNA
tattattttggctaattcta

SEQ ID NO: 3486 - DNA, 20 bp, Arachis hypogaea
  source 1..20: mol_type = other DNA
tattttggctaattctatgg

SEQ ID NO: 3487 - DNA, 20 bp, Arachis hypogaea
  source 1..20: mol_type = other DNA
attctatggtggctctgaac

SEQ ID NO: 3488 - DNA, 20 bp, Arachis hypogaea
  source 1..20: mol_type = other DNA
gttagacaaaatttaggtac

SEQ ID NO: 3489 - DNA, 20 bp, Arachis hypogaea
  source 1..20: mol_type = other DNA
aaataagttagacaaaattt

SEQ ID NO: 3490 - DNA, 20 bp, Arachis hypogaea
  source 1..20: mol_type = other DNA
aataattagggtaaaataat

SEQ ID NO: 3491 - DNA, 20 bp, Arachis hypogaea
  source 1..20: mol_type = other DNA
tccctaaattagaataatta

SEQ ID NO: 3492 - DNA, 20 bp, Arachis hypogaea
  source 1..20: mol_type = other DNA
gtccctaaattagaataatt

SEQ ID NO: 3493 - DNA, 20 bp, Arachis hypogaea
  source 1..20: mol_type = other DNA
taccctaattattctaattt

SEQ ID NO: 3494 - DNA, 20 bp, Arachis hypogaea
  source 1..20: mol_type = other DNA
accctaattattctaattta

SEQ ID NO: 3495 - DNA, 20 bp, Arachis hypogaea
  source 1..20: mol_type = other DNA
taatttagggactaatcttt

SEQ ID NO: 3496 - DNA, 20 bp, Arachis hypogaea
  source 1..20: mol_type = other DNA
aagaaaattaaaaaataacg

SEQ ID NO: 3497 - DNA, 20 bp, Arachis hypogaea
  source 1..20: mol_type = other DNA
tgtattatttttttttctct

SEQ ID NO: 3498 - DNA, 20 bp, Arachis hypogaea
  source 1..20: mol_type = other DNA
attatttttttttctctagg

SEQ ID NO: 3499 - DNA, 20 bp, Arachis hypogaea
  source 1..20: mol_type = other DNA
gtagtattctatgtccaatt

SEQ ID NO: 3500 - DNA, 20 bp, Arachis hypogaea
  source 1..20: mol_type = other DNA
accaaccaattagtccaaat

SEQ ID NO: 3501 - DNA, 20 bp, Arachis hypogaea
  source 1..20: mol_type = other DNA
tatgtccaatttggactaat

SEQ ID NO: 3502 - DNA, 20 bp, Arachis hypogaea
  source 1..20: mol_type = other DNA
tccaatttggactaattggt

SEQ ID NO: 3503 - DNA, 20 bp, Arachis hypogaea
  source 1..20: mol_type = other DNA
tttgattctatgatcctagt

SEQ ID NO: 3504 - DNA, 20 bp, Arachis hypogaea
  source 1..20: mol_type = other DNA
ttgattctatgatcctagtt

SEQ ID NO: 3505 - DNA, 20 bp, Arachis hypogaea
  source 1..20: mol_type = other DNA
tgtgagttgtaaacccaact

SEQ ID NO: 3506 - DNA, 20 bp, Arachis hypogaea
  source 1..20: mol_type = other DNA
actcacaaatagccaatgct

SEQ ID NO: 3507 - DNA, 20 bp, Arachis hypogaea
  source 1..20: mol_type = other DNA
aattaaagctttcctagcat

SEQ ID NO: 3508 - DNA, 20 bp, Arachis hypogaea
  source 1..20: mol_type = other DNA
attaacgaaattacccttat

SEQ ID NO: 3509 - DNA, 20 bp, Arachis hypogaea
  source 1..20: mol_type = other DNA
tgatctttctaaaccaataa

SEQ ID NO: 3510 - DNA, 20 bp, Arachis hypogaea
  source 1..20: mol_type = other DNA
atgatctttctaaaccaata

SEQ ID NO: 3511 - DNA, 20 bp, Arachis hypogaea
  source 1..20: mol_type = other DNA
gtgcgcaagttgacgtcggt

SEQ ID NO: 3512 - DNA, 20 bp, Arachis hypogaea
  source 1..20: mol_type = other DNA
agaagtgcgcaagttgacgt

SEQ ID NO: 3513 - DNA, 20 bp, Arachis hypogaea
  source 1..20: mol_type = other DNA
aacttgcgcacttctattat

SEQ ID NO: 3514 - DNA, 20 bp, Arachis hypogaea
  source 1..20: mol_type = other DNA
tttagagtagacagaattaa

SEQ ID NO: 3515 - DNA, 20 bp, Arachis hypogaea
  source 1..20: mol_type = other DNA
cagaattaaaggtcaaaaaa

SEQ ID NO: 3516 - DNA, 20 bp, Arachis hypogaea
  source 1..20: mol_type = other DNA
ataaattaaaaatgcaaaac

SEQ ID NO: 3517 - DNA, 20 bp, Arachis hypogaea
  source 1..20: mol_type = other DNA
taaattaaaaatgcaaaaca

SEQ ID NO: 3518 - DNA, 20 bp, Arachis hypogaea
  source 1..20: mol_type = other DNA
aataatatcatagtataaag

SEQ ID NO: 3519 - DNA, 20 bp, Arachis hypogaea
  source 1..20: mol_type = other DNA
tcttatttttgttactttta

SEQ ID NO: 3520 - DNA, 20 bp, Arachis hypogaea
  source 1..20: mol_type = other DNA
aaaaatagaaacattagatg

SEQ ID NO: 3521 - DNA, 20 bp, Arachis hypogaea
  source 1..20: mol_type = other DNA
aaaaaatagaaacattagat

SEQ ID NO: 3522 - DNA, 20 bp, Arachis hypogaea
  source 1..20: mol_type = other DNA
taaaaaatagaaacattaga

SEQ ID NO: 3523 - DNA, 20 bp, Arachis hypogaea
  source 1..20: mol_type = other DNA
tgaaaatcttaaaatcgatt

SEQ ID NO: 3524 - DNA, 20 bp, Arachis hypogaea
  source 1..20: mol_type = other DNA
ctagctaataaatgttgagt

SEQ ID NO: 3525 - DNA, 20 bp, Arachis hypogaea
  source 1..20: mol_type = other DNA
ttaatttttaaaaactaaaa

SEQ ID NO: 3526 - DNA, 20 bp, Arachis hypogaea
  source 1..20: mol_type = other DNA
ataaaggttggagcttttgt

SEQ ID NO: 3527 - DNA, 20 bp, Arachis hypogaea
  source 1..20: mol_type = other DNA
ctaaataccactataaaggt

SEQ ID NO: 3528 - DNA, 20 bp, Arachis hypogaea
  source 1..20: mol_type = other DNA
aaaagctccaacctttatag

SEQ ID NO: 3529 - DNA, 20 bp, Arachis hypogaea
  source 1..20: mol_type = other DNA
actactaaataccactataa

SEQ ID NO: 3530 - DNA, 20 bp, Arachis hypogaea
  source 1..20: mol_type = other DNA
tagtagttagtatgtttatg

SEQ ID NO: 3531 - DNA, 20 bp, Arachis hypogaea
  source 1..20: mol_type = other DNA
tgtttatgaggttacaagag

SEQ ID NO: 3532 - DNA, 20 bp, Arachis hypogaea
  source 1..20: mol_type = other DNA
gtttatgaggttacaagaga

SEQ ID NO: 3533 - DNA, 20 bp, Arachis hypogaea
  source 1..20: mol_type = other DNA
acccaaaaggagcattggag

SEQ ID NO: 3534 - DNA, 20 bp, Arachis hypogaea
  source 1..20: mol_type = other DNA
ttcctacccaaaaggagcat

SEQ ID NO: 3535 - DNA, 20 bp, Arachis hypogaea
  source 1..20: mol_type = other DNA
ggccactccaatgctccttt

SEQ ID NO: 3536 - DNA, 20 bp, Arachis hypogaea
  source 1..20: mol_type = other DNA
gccactccaatgctcctttt

SEQ ID NO: 3537 - DNA, 20 bp, Arachis hypogaea
  source 1..20: mol_type = other DNA
cttctctcttcctacccaaa

SEQ ID NO: 3538 - DNA, 20 bp, Arachis hypogaea
  source 1..20: mol_type = other DNA
ctccaatgctccttttgggt

SEQ ID NO: 3539 - DNA, 20 bp, Arachis hypogaea
  source 1..20: mol_type = other DNA
gagaagaaaattgaagagaa

SEQ ID NO: 3540 - DNA, 20 bp, Arachis hypogaea
  source 1..20: mol_type = other DNA
attcatgtttagtagtttgt

SEQ ID NO: 3541 - DNA, 20 bp, Arachis hypogaea
  source 1..20: mol_type = other DNA
ttagtagtttgttggtgtca

SEQ ID NO: 3542 - DNA, 20 bp, Arachis hypogaea
  source 1..20: mol_type = other DNA
ggtgtcatggtaaaaatcta

SEQ ID NO: 3543 - DNA, 20 bp, Arachis hypogaea
  source 1..20: mol_type = other DNA
atggcaatttattataattg

SEQ ID NO: 3544 - DNA, 20 bp, Arachis hypogaea
  source 1..20: mol_type = other DNA
tggcaatttattataattga

SEQ ID NO: 3545 - DNA, 20 bp, Arachis hypogaea
  source 1..20: mol_type = other DNA
aatttattataattgaggga

SEQ ID NO: 3546 - DNA, 20 bp, Arachis hypogaea
  source 1..20: mol_type = other DNA
agggacggcatttccgagag

SEQ ID NO: 3547 - DNA, 20 bp, Arachis hypogaea
  source 1..20: mol_type = other DNA
gtatatgttattacctctct

SEQ ID NO: 3548 - DNA, 20 bp, Arachis hypogaea
  source 1..20: mol_type = other DNA
aggtaataacatatacagtg

SEQ ID NO: 3549 - DNA, 20 bp, Arachis hypogaea
  source 1..20: mol_type = other DNA
ctctgagcgagtactttatt

SEQ ID NO: 3550 - DNA, 20 bp, Arachis hypogaea
  source 1..20: mol_type = other DNA
tctgagcgagtactttatta

SEQ ID NO: 3551 - DNA, 20 bp, Arachis hypogaea
  source 1..20: mol_type = other DNA
agcgagtactttattagggt

SEQ ID NO: 3552 - DNA, 20 bp, Arachis hypogaea
  source 1..20: mol_type = other DNA
tgtgttcttttgcagttttg

SEQ ID NO: 3553 - DNA, 20 bp, Arachis hypogaea
  source 1..20: mol_type = other DNA
atgtgttcttttgcagtttt

SEQ ID NO: 3554 - DNA, 20 bp, Arachis hypogaea
  source 1..20: mol_type = other DNA
aatgtgttcttttgcagttt

SEQ ID NO: 3555 - DNA, 20 bp, Arachis hypogaea
  source 1..20: mol_type = other DNA
acatgaaatgggtaaaaaaa

SEQ ID NO: 3556 - DNA, 20 bp, Arachis hypogaea
  source 1..20: mol_type = other DNA
gtaggagtggcacatgaaat

SEQ ID NO: 3557 - DNA, 20 bp, Arachis hypogaea
  source 1..20: mol_type = other DNA
ggtaggagtggcacatgaaa

SEQ ID NO: 3558 - DNA, 20 bp, Arachis hypogaea
  source 1..20: mol_type = other DNA
ctgtagttgactggtaggag

SEQ ID NO: 3559 - DNA, 20 bp, Arachis hypogaea
  source 1..20: mol_type = other DNA
gcttactgtagttgactggt

SEQ ID NO: 3560 - DNA, 20 bp, Arachis hypogaea
  source 1..20: mol_type = other DNA
caacgcttactgtagttgac

SEQ ID NO: 3561 - DNA, 20 bp, Arachis hypogaea
  source 1..20: mol_type = other DNA
gtcaactacagtaagcgttg

SEQ ID NO: 3562 - DNA, 20 bp, Arachis hypogaea
  source 1..20: mol_type = other DNA
tttatatgagataattttta

SEQ ID NO: 3563 - DNA, 20 bp, Arachis hypogaea
  source 1..20: mol_type = other DNA
ttatatgagataatttttat

SEQ ID NO: 3564 - DNA, 20 bp, Arachis hypogaea
  source 1..20: mol_type = other DNA
aaaagtgtgatttattgatt

SEQ ID NO: 3565 - DNA, 20 bp, Arachis hypogaea
  source 1..20: mol_type = other DNA
tgttgtttttatttgaagtg

SEQ ID NO: 3566 - DNA, 20 bp, Arachis hypogaea
  source 1..20: mol_type = other DNA
cccttagatgatggagtgta

SEQ ID NO: 3567 - DNA, 20 bp, Arachis hypogaea
  source 1..20: mol_type = other DNA
acccttagatgatggagtgt

SEQ ID NO: 3568 - DNA, 20 bp, Arachis hypogaea
  source 1..20: mol_type = other DNA
tctttttgacccttagatga

SEQ ID NO: 3569 - DNA, 20 bp, Arachis hypogaea
  source 1..20: mol_type = other DNA
accctacactccatcatcta

SEQ ID NO: 3570 - DNA, 20 bp, Arachis hypogaea
  source 1..20: mol_type = other DNA
ccctacactccatcatctaa

SEQ ID NO: 3571 - DNA, 20 bp, Arachis hypogaea
  source 1..20: mol_type = other DNA
agacaattataatatcttca

SEQ ID NO: 3572 - DNA, 20 bp, Arachis hypogaea
  source 1..20: mol_type = other DNA
gacaattataatatcttcat

SEQ ID NO: 3573 - DNA, 20 bp, Arachis hypogaea
  source 1..20: mol_type = other DNA
aagaggttataaaaattggt

SEQ ID NO: 3574 - DNA, 20 bp, Arachis hypogaea
  source 1..20: mol_type = other DNA
aaagaggttataaaaattgg

SEQ ID NO: 3575 - DNA, 20 bp, Arachis hypogaea
  source 1..20: mol_type = other DNA
ttaaaagaggttataaaaat

SEQ ID NO: 3576 - DNA, 20 bp, Arachis hypogaea
  source 1..20: mol_type = other DNA
agaaatacttttcttaaaag

SEQ ID NO: 3577 - DNA, 20 bp, Arachis hypogaea
  source 1..20: mol_type = other DNA
taccaaccagaaaagaaaac

SEQ ID NO: 3578 - DNA, 20 bp, Arachis hypogaea
  source 1..20: mol_type = other DNA
atgtatcctgttttcttttc

SEQ ID NO: 3579 - DNA, 20 bp, Arachis hypogaea
  source 1..20: mol_type = other DNA
atcctgttttcttttctggt

SEQ ID NO: 3580 - DNA, 20 bp, Arachis hypogaea
  source 1..20: mol_type = other DNA
tttctggttggtaccgtctg

SEQ ID NO: 3581 - DNA, 20 bp, Arachis hypogaea
  source 1..20: mol_type = other DNA
tatcatatcatagccacaga

SEQ ID NO: 3582 - DNA, 20 bp, Arachis hypogaea
  source 1..20: mol_type = other DNA
tctgtggctatgatatgata

SEQ ID NO: 3583 - DNA, 20 bp, Arachis hypogaea
  source 1..20: mol_type = other DNA
tatgatatggaccaattatg

SEQ ID NO: 3584 - DNA, 20 bp, Arachis hypogaea
  source 1..20: mol_type = other DNA
atgctactcctccacataat

SEQ ID NO: 3585 - DNA, 20 bp, Arachis hypogaea
  source 1..20: mol_type = other DNA
gatatggaccaattatgtgg

SEQ ID NO: 3586 - DNA, 20 bp, Arachis hypogaea
  source 1..20: mol_type = other DNA
agcatttagattgcataatt

SEQ ID NO: 3587 - DNA, 20 bp, Arachis hypogaea
  source 1..20: mol_type = other DNA
gcatttagattgcataatta

SEQ ID NO: 3588 - DNA, 20 bp, Arachis hypogaea
  source 1..20: mol_type = other DNA
tatgcaagttgcaatcttgc

SEQ ID NO: 3589 - DNA, 20 bp, Arachis hypogaea
  source 1..20: mol_type = other DNA
gttcttcaattaaataatta

SEQ ID NO: 3590 - DNA, 20 bp, Arachis hypogaea
  source 1..20: mol_type = other DNA
attgtgtcctatatctgaca

SEQ ID NO: 3591 - DNA, 20 bp, Arachis hypogaea
  source 1..20: mol_type = other DNA
tgaagaaccatgtcagatat

SEQ ID NO: 3592 - DNA, 20 bp, Arachis hypogaea
  source 1..20: mol_type = other DNA
aaaccaatagtggagcacac

SEQ ID NO: 3593 - DNA, 20 bp, Arachis hypogaea
  source 1..20: mol_type = other DNA
aaaaccaatagtggagcaca

SEQ ID NO: 3594 - DNA, 20 bp, Arachis hypogaea
  source 1..20: mol_type = other DNA
aatcccgtgtgctccactat

SEQ ID NO: 3595 - DNA, 20 bp, Arachis hypogaea
  source 1..20: mol_type = other DNA
tgtgtgtccaaaaccaatag

SEQ ID NO: 3596 - DNA, 20 bp, Arachis hypogaea
  source 1..20: mol_type = other DNA
gtgtgctccactattggttt

SEQ ID NO: 3597 - DNA, 20 bp, Arachis hypogaea
  source 1..20: mol_type = other DNA
attggttttggacacacact

SEQ ID NO: 3598 - DNA, 20 bp, Arachis hypogaea
  source 1..20: mol_type = other DNA
ggtcccgtccaaagtagata

SEQ ID NO: 3599 - DNA, 20 bp, Arachis hypogaea
  source 1..20: mol_type = other DNA
cggtcccgtccaaagtagat

SEQ ID NO: 3600 - DNA, 20 bp, Arachis hypogaea
  source 1..20: mol_type = other DNA
aggcaagtccctatctactt

SEQ ID NO: 3601 - DNA, 20 bp, Arachis hypogaea
  source 1..20: mol_type = other DNA
aagtccctatctactttgga

SEQ ID NO: 3602 - DNA, 20 bp, Arachis hypogaea
  source 1..20: mol_type = other DNA
agtccctatctactttggac

SEQ ID NO: 3603 - DNA, 20 bp, Arachis hypogaea
  source 1..20: mol_type = other DNA
ctatctactttggacgggac

SEQ ID NO: 3604 - DNA, 20 bp, Arachis hypogaea
  source 1..20: mol_type = other DNA
atcagagccaatggggtctc

SEQ ID NO: 3605 - DNA, 20 bp, Arachis hypogaea
  source 1..20: mol_type = other DNA
gacgggaccggagaccccat

SEQ ID NO: 3606 - DNA, 20 bp, Arachis hypogaea
  source 1..20: mol_type = other DNA
tttgtggatcagagccaatg

SEQ ID NO: 3607 - DNA, 20 bp, Arachis hypogaea
  source 1..20: mol_type = other DNA
ttttgtggatcagagccaat

SEQ ID NO: 3608 - DNA, 20 bp, Arachis hypogaea
  source 1..20: mol_type = other DNA
tttttgtggatcagagccaa

SEQ ID NO: 3609 - DNA, 20 bp, Arachis hypogaea
  source 1..20: mol_type = other DNA
aaatttggtgaatatttttg

SEQ ID NO: 3610 - DNA, 20 bp, Arachis hypogaea
  source 1..20: mol_type = other DNA
cactgcatgtgcaataaatt

SEQ ID NO: 3611 - DNA, 20 bp, Arachis hypogaea
  source 1..20: mol_type = other DNA
caaatttattgcacatgcag

SEQ ID NO: 3612 - DNA, 20 bp, Arachis hypogaea
  source 1..20: mol_type = other DNA
atattagcaattctctacaa

SEQ ID NO: 3613 - DNA, 20 bp, Arachis hypogaea
  source 1..20: mol_type = other DNA
ttgcgtaacatgtagtcttt

SEQ ID NO: 3614 - DNA, 20 bp, Arachis hypogaea
  source 1..20: mol_type = other DNA
gtaacatgtagtcttttgga

SEQ ID NO: 3615 - DNA, 20 bp, Arachis hypogaea
  source 1..20: mol_type = other DNA
tggaaggtttattttgtatg

SEQ ID NO: 3616 - DNA, 20 bp, Arachis hypogaea
  source 1..20: mol_type = other DNA
tattttttaaccgaaaaatc

SEQ ID NO: 3617 - DNA, 20 bp, Arachis hypogaea
  source 1..20: mol_type = other DNA
tgcatgcatgcctgattttt

SEQ ID NO: 3618 - DNA, 20 bp, Arachis hypogaea
  source 1..20: mol_type = other DNA
tcttttaggttataataatt

SEQ ID NO: 3619 - DNA, 20 bp, Arachis hypogaea
  source 1..20: mol_type = other DNA
atcagattgacaagtctttt

SEQ ID NO: 3620 - DNA, 20 bp, Arachis hypogaea
  source 1..20: mol_type = other DNA
cacacaaattgttaaggtta

SEQ ID NO: 3621 - DNA, 20 bp, Arachis hypogaea
  source 1..20: mol_type = other DNA
atatgtcacacaaattgtta

SEQ ID NO: 3622 - DNA, 20 bp, Arachis hypogaea
  source 1..20: mol_type = other DNA
gagtcatggcctttcaaagc

SEQ ID NO: 3623 - DNA, 20 bp, Arachis hypogaea
  source 1..20: mol_type = other DNA
tgacatattcctgctttgaa

SEQ ID NO: 3624 - DNA, 20 bp, Arachis hypogaea
  source 1..20: mol_type = other DNA
aactttgcctgcatgagtca

SEQ ID NO: 3625 - DNA, 20 bp, Arachis hypogaea
  source 1..20: mol_type = other DNA
tgaaaggccatgactcatgc

SEQ ID NO: 3626 - DNA, 20 bp, Arachis hypogaea
  source 1..20: mol_type = other DNA
gactcatgcaggcaaagtta

SEQ ID NO: 3627 - DNA, 20 bp, Arachis hypogaea
  source 1..20: mol_type = other DNA
aatttctctttgatattacg

SEQ ID NO: 3628 - DNA, 20 bp, Arachis hypogaea
  source 1..20: mol_type = other DNA
aatatcaaagagaaattctt

SEQ ID NO: 3629 - DNA, 20 bp, Arachis hypogaea
  source 1..20: mol_type = other DNA
aatttagacaaaaatttcat

SEQ ID NO: 3630 - DNA, 20 bp, Arachis hypogaea
  source 1..20: mol_type = other DNA
ttaaaagtaaagaatagagt

SEQ ID NO: 3631 - DNA, 20 bp, Arachis hypogaea
  source 1..20: mol_type = other DNA
aaagtaaagaatagagtagg

SEQ ID NO: 3632 - DNA, 20 bp, Arachis hypogaea
  source 1..20: mol_type = other DNA
aagtaaagaatagagtaggt

SEQ ID NO: 3633 - DNA, 20 bp, Arachis hypogaea
  source 1..20: mol_type = other DNA
cgcaagattcaaaaataaaa

SEQ ID NO: 3634 - DNA, 20 bp, Arachis hypogaea
  source 1..20: mol_type = other DNA
tcgcaagattcaaaaataaa

SEQ ID NO: 3635 - DNA, 20 bp, Arachis hypogaea
  source 1..20: mol_type = other DNA
gaatcttgcgagttaaattt

SEQ ID NO: 3636 - DNA, 20 bp, Arachis hypogaea
  source 1..20: mol_type = other DNA
tagtcagagtattttgataa

SEQ ID NO: 3637 - DNA, 20 bp, Arachis hypogaea
  source 1..20: mol_type = other DNA
aaattatcgaataaaaaaca

SEQ ID NO: 3638 - DNA, 20 bp, Arachis hypogaea
  source 1..20: mol_type = other DNA
gtcagttgaaaatatagaaa

SEQ ID NO: 3639 - DNA, 20 bp, Arachis hypogaea
  source 1..20: mol_type = other DNA
gcaggaaattttatgatttt

SEQ ID NO: 3640 - DNA, 20 bp, Arachis hypogaea
  source 1..20: mol_type = other DNA
atggaaaggggcaaggttgc

SEQ ID NO: 3641 - DNA, 20 bp, Arachis hypogaea
  source 1..20: mol_type = other DNA
gaattatatggaaaggggca

SEQ ID NO: 3642 - DNA, 20 bp, Arachis hypogaea
  source 1..20: mol_type = other DNA
acacagaattatatggaaag

SEQ ID NO: 3643 - DNA, 20 bp, Arachis hypogaea
  source 1..20: mol_type = other DNA
aacacagaattatatggaaa

SEQ ID NO: 3644 - DNA, 20 bp, Arachis hypogaea
  source 1..20: mol_type = other DNA
gaacacagaattatatggaa

SEQ ID NO: 3645 - DNA, 20 bp, Arachis hypogaea
  source 1..20: mol_type = other DNA
atcatgaacacagaattata

SEQ ID NO: 3646 - DNA, 20 bp, Arachis hypogaea
  source 1..20: mol_type = other DNA
atttttgtatttgtaaatgc

SEQ ID NO: 3647 - DNA, 20 bp, Arachis hypogaea
  source 1..20: mol_type = other DNA
tgtatttgtaaatgctggaa

SEQ ID NO: 3648 - DNA, 20 bp, Arachis hypogaea
  source 1..20: mol_type = other DNA
gaaaagttaaagtaaaaaaa

SEQ ID NO: 3649 - DNA, 20 bp, Arachis hypogaea
  source 1..20: mol_type = other DNA
ataacatacatagtacataa

SEQ ID NO: 3650 - DNA, 20 bp, Arachis hypogaea
  source 1..20: mol_type = other DNA
atgtatgttatgtattatag

SEQ ID NO: 3651 - DNA, 20 bp, Arachis hypogaea
  source 1..20: mol_type = other DNA
gtattatagcggttatagca

SEQ ID NO: 3652 - DNA, 20 bp, Arachis hypogaea
  source 1..20: mol_type = other DNA
ttctcactcagtaaggggaa

SEQ ID NO: 3653 - DNA, 20 bp, Arachis hypogaea
  source 1..20: mol_type = other DNA
ttcctttctcactcagtaag

SEQ ID NO: 3654 - DNA, 20 bp, Arachis hypogaea
  source 1..20: mol_type = other DNA
tttcctttctcactcagtaa

SEQ ID NO: 3655 - DNA, 20 bp, Arachis hypogaea
  source 1..20: mol_type = other DNA
atttcctttctcactcagta

SEQ ID NO: 3656 - DNA, 20 bp, Arachis hypogaea
  source 1..20: mol_type = other DNA
ttccccttactgagtgagaa

SEQ ID NO: 3657 - DNA, 20 bp, Arachis hypogaea
  source 1..20: mol_type = other DNA
ttatagtcatcactgtttac

SEQ ID NO: 3658 - DNA, 20 bp, Arachis hypogaea
  source 1..20: mol_type = other DNA
tatacaagaacattattaac

SEQ ID NO: 3659 - DNA, 20 bp, Arachis hypogaea
  source 1..20: mol_type = other DNA
atgagaatggaaaatgtgtg

SEQ ID NO: 3660 - DNA, 20 bp, Arachis hypogaea
  source 1..20: mol_type = other DNA
ttgtgcagaaagaatgagaa

SEQ ID NO: 3661 - DNA, 20 bp, Arachis hypogaea
  source 1..20: mol_type = other DNA
agatagtgctaaattttatt

SEQ ID NO: 3662 - DNA, 20 bp, Arachis hypogaea
  source 1..20: mol_type = other DNA
gatagtgctaaattttattc

SEQ ID NO: 3663 - DNA, 20 bp, Arachis hypogaea
  source 1..20: mol_type = other DNA
tgcactgttatgttatgtac

SEQ ID NO: 3664 - DNA, 20 bp, Arachis hypogaea
  source 1..20: mol_type = other DNA
gttatgttatgtacaggttg

SEQ ID NO: 3665 - DNA, 20 bp, Arachis hypogaea
  source 1..20: mol_type = other DNA
ttatgttatgtacaggttgc

SEQ ID NO: 3666 - DNA, 20 bp, Arachis hypogaea
  source 1..20: mol_type = other DNA
atgtacaggttgcgggaaga

SEQ ID NO: 3667 - DNA, 20 bp, Arachis hypogaea
  source 1..20: mol_type = other DNA
tgtacaggttgcgggaagat

SEQ ID NO: 3668 - DNA, 20 bp, Arachis hypogaea
  source 1..20: mol_type = other DNA
ggttgcgggaagatgggagc

SEQ ID NO: 3669 - DNA, 20 bp, Arachis hypogaea
  source 1..20: mol_type = other DNA
tgcgggaagatgggagctgg

SEQ ID NO: 3670 - DNA, 20 bp, Arachis hypogaea
  source 1..20: mol_type = other DNA
ttgaaggaggaacagaggtt

SEQ ID NO: 3671 - DNA, 20 bp, Arachis hypogaea
  source 1..20: mol_type = other DNA
cctgtttgaaggaggaacag

SEQ ID NO: 3672 - DNA, 20 bp, Arachis hypogaea
  source 1..20: mol_type = other DNA
tcgaccgtcctgtttgaagg

SEQ ID NO: 3673 - DNA, 20 bp, Arachis hypogaea
  source 1..20: mol_type = other DNA
cctctgttcctccttcaaac

SEQ ID NO: 3674 - DNA, 20 bp, Arachis hypogaea
  source 1..20: mol_type = other DNA
gcctcgaccgtcctgtttga

SEQ ID NO: 3675 - DNA, 20 bp, Arachis hypogaea
  source 1..20: mol_type = other DNA
tgttcctccttcaaacagga

SEQ ID NO: 3676 - DNA, 20 bp, Arachis hypogaea
  source 1..20: mol_type = other DNA
tccttcaaacaggacggtcg

SEQ ID NO: 3677 - DNA, 20 bp, Arachis hypogaea
  source 1..20: mol_type = other DNA
ctgaagggaggtttttcatg

SEQ ID NO: 3678 - DNA, 20 bp, Arachis hypogaea
  source 1..20: mol_type = other DNA
acttggctgagactgaaggg

SEQ ID NO: 3679 - DNA, 20 bp, Arachis hypogaea
  source 1..20: mol_type = other DNA
ttgacttggctgagactgaa

SEQ ID NO: 3680 - DNA, 20 bp, Arachis hypogaea
  source 1..20: mol_type = other DNA
cttgacttggctgagactga

SEQ ID NO: 3681 - DNA, 20 bp, Arachis hypogaea
  source 1..20: mol_type = other DNA
gtgggatggccttcttgact

SEQ ID NO: 3682 - DNA, 20 bp, Arachis hypogaea
  source 1..20: mol_type = other DNA
cagtctcagccaagtcaaga

SEQ ID NO: 3683 - DNA, 20 bp, Arachis hypogaea
  source 1..20: mol_type = other DNA
ctgaaaacagtgaggtggga

SEQ ID NO: 3684 - DNA, 20 bp, Arachis hypogaea
  source 1..20: mol_type = other DNA
aacgctgaaaacagtgaggt

SEQ ID NO: 3685 - DNA, 20 bp, Arachis hypogaea
  source 1..20: mol_type = other DNA
gaacgctgaaaacagtgagg

SEQ ID NO: 3686 - DNA, 20 bp, Arachis hypogaea
  source 1..20: mol_type = other DNA
acagaacgctgaaaacagtg

SEQ ID NO: 3687 - DNA, 20 bp, Arachis hypogaea
  source 1..20: mol_type = other DNA
agacaacataggagaatgag

SEQ ID NO: 3688 - DNA, 20 bp, Arachis hypogaea
  source 1..20: mol_type = other DNA
ggtgagatcatagacaacat

SEQ ID NO: 3689 - DNA, 20 bp, Arachis hypogaea
  source 1..20: mol_type = other DNA
atagtagaggcaaaaggcta

SEQ ID NO: 3690 - DNA, 20 bp, Arachis hypogaea
  source 1..20: mol_type = other DNA
ggcggcatagtagaggcaaa

SEQ ID NO: 3691 - DNA, 20 bp, Arachis hypogaea
  source 1..20: mol_type = other DNA
aattggtggcggcatagtag

SEQ ID NO: 3692 - DNA, 20 bp, Arachis hypogaea
  source 1..20: mol_type = other DNA
tttgtggaagtaattggtgg

SEQ ID NO: 3693 - DNA, 20 bp, Arachis hypogaea
  source 1..20: mol_type = other DNA
gagtttgtggaagtaattgg

SEQ ID NO: 3694 - DNA, 20 bp, Arachis hypogaea
  source 1..20: mol_type = other DNA
agagagtttgtggaagtaat

SEQ ID NO: 3695 - DNA, 20 bp, Arachis hypogaea
  source 1..20: mol_type = other DNA
ataaaggggaagagagtttg

SEQ ID NO: 3696 - DNA, 20 bp, Arachis hypogaea
  source 1..20: mol_type = other DNA
ccaggccaagtaaaataaag

SEQ ID NO: 3697 - DNA, 20 bp, Arachis hypogaea
  source 1..20: mol_type = other DNA
gccaggccaagtaaaataaa

SEQ ID NO: 3698 - DNA, 20 bp, Arachis hypogaea
  source 1..20: mol_type = other DNA
agccaggccaagtaaaataa

SEQ ID NO: 3699 - DNA, 20 bp, Arachis hypogaea
  source 1..20: mol_type = other DNA
ctcttcccctttattttact

SEQ ID NO: 3700 - DNA, 20 bp, Arachis hypogaea
  source 1..20: mol_type = other DNA
cccctttattttacttggcc

SEQ ID NO: 3701 - DNA, 20 bp, Arachis hypogaea
  source 1..20: mol_type = other DNA
gacagccccgtagagaagcc

SEQ ID NO: 3702 - DNA, 20 bp, Arachis hypogaea
  source 1..20: mol_type = other DNA
tacttggcctggcttctcta

SEQ ID NO: 3703 - DNA, 20 bp, Arachis hypogaea
  source 1..20: mol_type = other DNA
acttggcctggcttctctac

SEQ ID NO: 3704 - DNA, 20 bp, Arachis hypogaea
  source 1..20: mol_type = other DNA
cttggcctggcttctctacg

SEQ ID NO: 3705 - DNA, 20 bp, Arachis hypogaea
  source 1..20: mol_type = other DNA
cttctctacggggctgtcca

SEQ ID NO: 3706 - DNA, 20 bp, Arachis hypogaea
  source 1..20: mol_type = other DNA
caccggtaaggatgcaacct

SEQ ID NO: 3707 - DNA, 20 bp, Arachis hypogaea
  source 1..20: mol_type = other DNA
gtccaaggttgcatccttac

SEQ ID NO: 3708 - DNA, 20 bp, Arachis hypogaea
  source 1..20: mol_type = other DNA
cgatgacccaaacaccggta

SEQ ID NO: 3709 - DNA, 20 bp, Arachis hypogaea
  source 1..20: mol_type = other DNA
gttgcatccttaccggtgtt

SEQ ID NO: 3710 - DNA, 20 bp, Arachis hypogaea
  source 1..20: mol_type = other DNA
ttgcatccttaccggtgttt

SEQ ID NO: 3711 - DNA, 20 bp, Arachis hypogaea
  source 1..20: mol_type = other DNA
gtgtgcgatgacccaaacac

SEQ ID NO: 3712 - DNA, 20 bp, Arachis hypogaea
  source 1..20: mol_type = other DNA
tgggtcatcgcacacgaatg

SEQ ID NO: 3713 - DNA, 20 bp, Arachis hypogaea
  source 1..20: mol_type = other DNA
gataatcactgaatgcatgg

SEQ ID NO: 3714 - DNA, 20 bp, Arachis hypogaea
  source 1..20: mol_type = other DNA
attgataatcactgaatgca

SEQ ID NO: 3715 - DNA, 20 bp, Arachis hypogaea
  source 1..20: mol_type = other DNA
atgcattcagtgattatcaa

SEQ ID NO: 3716 - DNA, 20 bp, Arachis hypogaea
  source 1..20: mol_type = other DNA
ttatcaatggcttgatgata

SEQ ID NO: 3717 - DNA, 20 bp, Arachis hypogaea
  source 1..20: mol_type = other DNA
caatggcttgatgatacggt

SEQ ID NO: 3718 - DNA, 20 bp, Arachis hypogaea
  source 1..20: mol_type = other DNA
agaggccagagtggagaaca

SEQ ID NO: 3719 - DNA, 20 bp, Arachis hypogaea
  source 1..20: mol_type = other DNA
gttggccttgttctccactc

SEQ ID NO: 3720 - DNA, 20 bp, Arachis hypogaea
  source 1..20: mol_type = other DNA
aagggaccaagaggccagag

SEQ ID NO: 3721 - DNA, 20 bp, Arachis hypogaea
  source 1..20: mol_type = other DNA
tgttctccactctggcctct

SEQ ID NO: 3722 - DNA, 20 bp, Arachis hypogaea
  source 1..20: mol_type = other DNA
atgaaaagtaagggaccaag

SEQ ID NO: 3723 - DNA, 20 bp, Arachis hypogaea
  source 1..20: mol_type = other DNA
tgtatttccatgaaaagtaa

SEQ ID NO: 3724 - DNA, 20 bp, Arachis hypogaea
  source 1..20: mol_type = other DNA
ctgtatttccatgaaaagta

SEQ ID NO: 3725 - DNA, 20 bp, Arachis hypogaea
  source 1..20: mol_type = other DNA
tcttggtcccttacttttca

SEQ ID NO: 3726 - DNA, 20 bp, Arachis hypogaea
  source 1..20: mol_type = other DNA
tgttggagtggtggcgacgg

SEQ ID NO: 3727 - DNA, 20 bp, Arachis hypogaea
  source 1..20: mol_type = other DNA
cggtgttggagtggtggcga

SEQ ID NO: 3728 - DNA, 20 bp, Arachis hypogaea
  source 1..20: mol_type = other DNA
gggaaccggtgttggagtgg

SEQ ID NO: 3729 - DNA, 20 bp, Arachis hypogaea
  source 1..20: mol_type = other DNA
caagggaaccggtgttggag

SEQ ID NO: 3730 - DNA, 20 bp, Arachis hypogaea
  source 1..20: mol_type = other DNA
cgtcgccaccactccaacac

SEQ ID NO: 3731 - DNA, 20 bp, Arachis hypogaea
  source 1..20: mol_type = other DNA
cctgtcaagggaaccggtgt

SEQ ID NO: 3732 - DNA, 20 bp, Arachis hypogaea
  source 1..20: mol_type = other DNA
ttcatccctgtcaagggaac

SEQ ID NO: 3733 - DNA, 20 bp, Arachis hypogaea
  source 1..20: mol_type = other DNA
ccaacaccggttcccttgac

SEQ ID NO: 3734 - DNA, 20 bp, Arachis hypogaea
  source 1..20: mol_type = other DNA
caacaccggttcccttgaca

SEQ ID NO: 3735 - DNA, 20 bp, Arachis hypogaea
  source 1..20: mol_type = other DNA
aaagacttcatccctgtcaa

SEQ ID NO: 3736 - DNA, 20 bp, Arachis hypogaea
  source 1..20: mol_type = other DNA
caaagacttcatccctgtca

SEQ ID NO: 3737 - DNA, 20 bp, Arachis hypogaea
  source 1..20: mol_type = other DNA
aagtctttgtgccaaagaaa

SEQ ID NO: 3738 - DNA, 20 bp, Arachis hypogaea
  source 1..20: mol_type = other DNA
gcaatactagaccttttctt

SEQ ID NO: 3739 - DNA, 20 bp, Arachis hypogaea
  source 1..20: mol_type = other DNA
agaaaaggtctagtattgca

SEQ ID NO: 3740 - DNA, 20 bp, Arachis hypogaea
  source 1..20: mol_type = other DNA
aaaggtctagtattgcatgg

SEQ ID NO: 3741 - DNA, 20 bp, Arachis hypogaea
  source 1..20: mol_type = other DNA
ctcttcctagtgggttatta

SEQ ID NO: 3742 - DNA, 20 bp, Arachis hypogaea
  source 1..20: mol_type = other DNA
aagtaccttaataacccact

SEQ ID NO: 3743 - DNA, 20 bp, Arachis hypogaea
  source 1..20: mol_type = other DNA
gtgtgagcactcttcctagt

SEQ ID NO: 3744 - DNA, 20 bp, Arachis hypogaea
  source 1..20: mol_type = other DNA
agtgtgagcactcttcctag

SEQ ID NO: 3745 - DNA, 20 bp, Arachis hypogaea
  source 1..20: mol_type = other DNA
aagtggccaaccaagggtga

SEQ ID NO: 3746 - DNA, 20 bp, Arachis hypogaea
  source 1..20: mol_type = other DNA
ctcactattaccctcaccct

SEQ ID NO: 3747 - DNA, 20 bp, Arachis hypogaea
  source 1..20: mol_type = other DNA
aaagtggccaaccaagggtg

SEQ ID NO: 3748 - DNA, 20 bp, Arachis hypogaea
  source 1..20: mol_type = other DNA
ctattaccctcacccttggt

SEQ ID NO: 3749 - DNA, 20 bp, Arachis hypogaea
  source 1..20: mol_type = other DNA
caagtaaagtggccaaccaa

SEQ ID NO: 3750 - DNA, 20 bp, Arachis hypogaea
  source 1..20: mol_type = other DNA
ccaagtaaagtggccaacca

SEQ ID NO: 3751 - DNA, 20 bp, Arachis hypogaea
  source 1..20: mol_type = other DNA
acattaaaagccaagtaaag

SEQ ID NO: 3752 - DNA, 20 bp, Arachis hypogaea
  source 1..20: mol_type = other DNA
ccttggttggccactttact

SEQ ID NO: 3753 - DNA, 20 bp, Arachis hypogaea
  source 1..20: mol_type = other DNA
ttacttggcttttaatgtct

SEQ ID NO: 3754 - DNA, 20 bp, Arachis hypogaea
  source 1..20: mol_type = other DNA
tacttggcttttaatgtctc

SEQ ID NO: 3755 - DNA, 20 bp, Arachis hypogaea
  source 1..20: mol_type = other DNA
tggcttttaatgtctcggga

SEQ ID NO: 3756 - DNA, 20 bp, Arachis hypogaea
  source 1..20: mol_type = other DNA
tctcgggaaggccttatgat

SEQ ID NO: 3757 - DNA, 20 bp, Arachis hypogaea
  source 1..20: mol_type = other DNA
tggcaagcaaacctatcata

SEQ ID NO: 3758 - DNA, 20 bp, Arachis hypogaea
  source 1..20: mol_type = other DNA
ttggaccatatgggtcatag

SEQ ID NO: 3759 - DNA, 20 bp, Arachis hypogaea
  source 1..20: mol_type = other DNA
gcttgccactatgacccata

SEQ ID NO: 3760 - DNA, 20 bp, Arachis hypogaea
  source 1..20: mol_type = other DNA
cggagtagattggaccatat

SEQ ID NO: 3761 - DNA, 20 bp, Arachis hypogaea
  source 1..20: mol_type = other DNA
tcggagtagattggaccata

SEQ ID NO: 3762 - DNA, 20 bp, Arachis hypogaea
  source 1..20: mol_type = other DNA
cgttcgcgatcggagtagat

SEQ ID NO: 3763 - DNA, 20 bp, Arachis hypogaea
  source 1..20: mol_type = other DNA
tatttgaagtcgttcgcgat

SEQ ID NO: 3764 - DNA, 20 bp, Arachis hypogaea
  source 1..20: mol_type = other DNA
caaatatacatatcagatgc

SEQ ID NO: 3765 - DNA, 20 bp, Arachis hypogaea
  source 1..20: mol_type = other DNA
ggagtgcttgcagtttccta

SEQ ID NO: 3766 - DNA, 20 bp, Arachis hypogaea
  source 1..20: mol_type = other DNA
gacaagacgaataagaccat

SEQ ID NO: 3767 - DNA, 20 bp, Arachis hypogaea
  source 1..20: mol_type = other DNA
tggtcttattcgtcttgtcc

SEQ ID NO: 3768 - DNA, 20 bp, Arachis hypogaea
  source 1..20: mol_type = other DNA
attcgtcttgtcctggcaaa

SEQ ID NO: 3769 - DNA, 20 bp, Arachis hypogaea
  source 1..20: mol_type = other DNA
cccaggcaaggccttttgcc

SEQ ID NO: 3770 - DNA, 20 bp, Arachis hypogaea
  source 1..20: mol_type = other DNA
tcctggcaaaaggccttgcc

SEQ ID NO: 3771 - DNA, 20 bp, Arachis hypogaea
  source 1..20: mol_type = other DNA
cctggcaaaaggccttgcct

SEQ ID NO: 3772 - DNA, 20 bp, Arachis hypogaea
  source 1..20: mol_type = other DNA
aaacagccacaacccaggca

SEQ ID NO: 3773 - DNA, 20 bp, Arachis hypogaea
  source 1..20: mol_type = other DNA
aaaaggccttgcctgggttg

SEQ ID NO: 3774 - DNA, 20 bp, Arachis hypogaea
  source 1..20: mol_type = other DNA
accataaacagccacaaccc

SEQ ID NO: 3775 - DNA, 20 bp, Arachis hypogaea
  source 1..20: mol_type = other DNA
gcctgggttgtggctgttta

SEQ ID NO: 3776 - DNA, 20 bp, Arachis hypogaea
  source 1..20: mol_type = other DNA
aatccattgaccactagcaa

SEQ ID NO: 3777 - DNA, 20 bp, Arachis hypogaea
  source 1..20: mol_type = other DNA
ttatggtgttccattgctag

SEQ ID NO: 3778 - DNA, 20 bp, Arachis hypogaea
  source 1..20: mol_type = other DNA
gttccattgctagtggtcaa

SEQ ID NO: 3779 - DNA, 20 bp, Arachis hypogaea
  source 1..20: mol_type = other DNA
gctagtggtcaatggattct

SEQ ID NO: 3780 - DNA, 20 bp, Arachis hypogaea
  source 1..20: mol_type = other DNA
aatcgtaatgtggcaatgca

SEQ ID NO: 3781 - DNA, 20 bp, Arachis hypogaea
  source 1..20: mol_type = other DNA
gaatcgtaatgtggcaatgc

SEQ ID NO: 3782 - DNA, 20 bp, Arachis hypogaea
  source 1..20: mol_type = other DNA
cactcggatgaatcgtaatg

SEQ ID NO: 3783 - DNA, 20 bp, Arachis hypogaea
  source 1..20: mol_type = other DNA
cacattacgattcatccgag

SEQ ID NO: 3784 - DNA, 20 bp, Arachis hypogaea
  source 1..20: mol_type = other DNA
acattacgattcatccgagt

SEQ ID NO: 3785 - DNA, 20 bp, Arachis hypogaea
  source 1..20: mol_type = other DNA
tcccctcaaccagtcccact

SEQ ID NO: 3786 - DNA, 20 bp, Arachis hypogaea
  source 1..20: mol_type = other DNA
acgattcatccgagtgggac

SEQ ID NO: 3787 - DNA, 20 bp, Arachis hypogaea
  source 1..20: mol_type = other DNA
catccgagtgggactggttg

SEQ ID NO: 3788 - DNA, 20 bp, Arachis hypogaea
  source 1..20: mol_type = other DNA
atccgagtgggactggttga

SEQ ID NO: 3789 - DNA, 20 bp, Arachis hypogaea
  source 1..20: mol_type = other DNA
tccgagtgggactggttgag

SEQ ID NO: 3790 - DNA, 20 bp, Arachis hypogaea
  source 1..20: mol_type = other DNA
ggactggttgaggggagcat

SEQ ID NO: 3791 - DNA, 20 bp, Arachis hypogaea
  source 1..20: mol_type = other DNA
gaggggagcattggcgaccg

SEQ ID NO: 3792 - DNA, 20 bp, Arachis hypogaea
  source 1..20: mol_type = other DNA
gattccatagtctctgtcca

SEQ ID NO: 3793 - DNA, 20 bp, Arachis hypogaea
  source 1..20: mol_type = other DNA
gcgaccgtggacagagacta

SEQ ID NO: 3794 - DNA, 20 bp, Arachis hypogaea
  source 1..20: mol_type = other DNA
agactatggaatcctgaaca

SEQ ID NO: 3795 - DNA, 20 bp, Arachis hypogaea
  source 1..20: mol_type = other DNA
tgttatggaagaccttgttc

SEQ ID NO: 3796 - DNA, 20 bp, Arachis hypogaea
  source 1..20: mol_type = other DNA
catgtgtgtcagtgatgtta

SEQ ID NO: 3797 - DNA, 20 bp, Arachis hypogaea
  source 1..20: mol_type = other DNA
taacatcactgacacacatg

SEQ ID NO: 3798 - DNA, 20 bp, Arachis hypogaea
  source 1..20: mol_type = other DNA
tgcatggtaatgcggcattg

SEQ ID NO: 3799 - DNA, 20 bp, Arachis hypogaea
  source 1..20: mol_type = other DNA
gcctccattgcatggtaatg

SEQ ID NO: 3800 - DNA, 20 bp, Arachis hypogaea
  source 1..20: mol_type = other DNA
aatgccgcattaccatgcaa

SEQ ID NO: 3801 - DNA, 20 bp, Arachis hypogaea
  source 1..20: mol_type = other DNA
catttgtagcctccattgca

SEQ ID NO: 3802 - DNA, 20 bp, Arachis hypogaea
  source 1..20: mol_type = other DNA
gccgcattaccatgcaatgg

SEQ ID NO: 3803 - DNA, 20 bp, Arachis hypogaea
  source 1..20: mol_type = other DNA
aaatgcaataaaaccaattt

SEQ ID NO: 3804 - DNA, 20 bp, Arachis hypogaea
  source 1..20: mol_type = other DNA
aatgcaataaaaccaatttt

SEQ ID NO: 3805 - DNA, 20 bp, Arachis hypogaea
  source 1..20: mol_type = other DNA
cgataatactctcccaaaat

SEQ ID NO: 3806 - DNA, 20 bp, Arachis hypogaea
  source 1..20: mol_type = other DNA
caattttgggagagtattat

SEQ ID NO: 3807 - DNA, 20 bp, Arachis hypogaea
  source 1..20: mol_type = other DNA
ggagagtattatcggttcga

SEQ ID NO: 3808 - DNA, 20 bp, Arachis hypogaea
  source 1..20: mol_type = other DNA
gagagtattatcggttcgat

SEQ ID NO: 3809 - DNA, 6115 bp, Arachis hypogaea
  source 1..6115: mol_type = genomic DNA
cttccatcacttcgccactctagctacttcctgtggtggttgagcagaatcagagacaagccatcctccaaagatcttctttgctggccgaatcttcatctttctttttgagtatgaaggatccgagattacgtcactaaatcttgccactttttggtgattatctcagccacaacatacttttggttttcttttccttgccatcattaacttgatagacttgaagcatgcagcttcttctttttctttttggtagcttagtgtagcttccatagtttcctgtgtaataaccgaagaagataagcaaagatgagagagaggagagagaaatttgaacactagctaatgggtaatgataaagtgaaattaaagtccagcttcccttgcataaggtagcgtgcagcacaatggcaatcaatcaattcaggtgcaaatttctctctcatgtttcccatgcaataaatggcaatttaatgaaatttggaatccatcacatggtataatgcttgtatccgttggaagcatgaggcaaatgttaacatttgctttcctgatggatttgaaatcaagcattggatcttaagcatataacacagttgggcttggagcaaccaaaatcattctagcccaagtagtttattttccattcagccacaagaaactaactcatattaatgctgaatattttaatcattgggctagcaacattttcttttatttcggcccaatttaaaacactacattgtctcagccacaatgatcacaataaattaatatcaaggctgaaagttcataagcatattgggcttgcaccagaatttcattttcggcccaactcaaaatctgcacaacaaaattattaattaagcaagtatgaattaagatcaaattaataattttgtaattaattattttaataatgtttgttcaccattaaaattaaattagagttttccaaactcatcaaattgtatcaagagaagtcagaggtaaaaggtgatttatttccttctacatgcatatcattttcttctcttcatcttcaactccctgtcactccaaattgggttacataggaaagatgatctctattcttcactgctgtgcatctacggtcataagtgtgtctggggaccaagttgtgtttcaatggctaagatatgggtttaccattgaaaatacttgtttatgctgccctatagctttcggtcaacaaagaagagtcagaaccacaacttctaatttggggattaaatgaaaagtgacctggtgagttggtgaagcacactgctttagggttgacctaggagagaggaactcagcaacatgcagggagatacaaaagaaaatttctcatcattctgaagcgaaggagagataaccagtgttttgaagtttatgttctgagaagaattctctaaaaaagttcatcaacttagacagtgctacctagtcaaaggaacattccgccagaatgaggaactaaatcacaggcaagcaaatctggttcatcacatagtaaagaggctgttgaaacatcaatctccttcatgctttacagattgtaattttttttagtgtttatatttctgtagtttcttgaggtaaaaggcagaatgagagagttcaagtaaaagtctaagagtggaaagaagctgagtgatacacttgagtgaaaagccttgagtgatttcagatttctttatgttgattctgtgtcttgtatcttgtacctgtgaggtacccttttcttagttgggttagcactaagagtgaagaattaggtattagcataaccaagtcaagttaggttaaaacttgagtgtgaaaagattgtgtcaattctgtggaattggtgtatgtaatactttaactatagtgaaaattccaccactgttgtggtggagactggacgtaggttgcattgcacaaggcaaccgaaccaggatacatgacggtgtcagcttctctcttccttgttctgttctgttttctgatattcatgagacaaaatgaaattgtctcataaatttttcgctggtgagttcaaatagattcagattgcaagtttgtttaaaagggttttgcattaaagtaaaagaaggacataaattcaaccccctttctttaagccttctacaaccttcagaaatattatgacttatgaatcaaattagaattcgacccaaatattgaaaatcaaaataatactttaccctctatatatatatatatatatatatatatatatatatatatatatatatatatatatatatatatatatatatatatatatgttgtcatattttataaaaatttaaaattcgtgtgtctacgtattttgtgttatatcgtatctgtgtttcatagaatttaagctcagagacatgaatttaacccttcggcaacttatctgtaagtcaactccaaaatcattcatgtagtgtttatttttttgtggagacgctaatctaatgtaaaagaaaagtcctttaacttatctcattctaagccataaatgtttcttgttttttgattggtggaggaatttggtgttacaaattggacttcaaagaataagccctcaaatagctcgactgattttgattataatttggaatatttgaaaggaaatgtgtcaacgaattttcaaatatgtccaagagtctctaaaaatagtgctagcataattgcttaagttaaactggaactatttattttacattatgcatagtatgtaaaattttttttcagttacttttctatgttattttcttctctcaatttcactagtaaatatttaaaaattttatttttctattttgtttatcttaacttttggatattgtatttatttatctatgaataaaatacaactattatgttaaaaaaaaaaaaaacttattagggttgatgctaaattggtgggttagatcgtcattgatcattgatcacaccaactaaaataccttaacttgttgtaactcgaaatatagcacactgttttccctataaaaacccaatgtgagtgagacaacaacttaacgcattacataaaaccttaaacgtggctgcgagattcatcataggagaagcactcacttctcttctctctgttggaattgctttcacggtttgcactatgttcctttaattataaaacattctgcttctgctcattgtattcttctatataattcatgcaaattgctctaaaaaattgaactcgtgttgctggtttcttcttgtgtccatttctataacatcaacatgcatgcttggataactttttattttgatcttttataataaccttgaatttttctgaattttgaagcaaaggggtgaggttttcttccatgttatttctactggatttcagattctgcattaaacaatatcaatgagaatgctgacaaatttcttttatcctcagacacacagttttgttatcccagctggtttcatagccgttcgtttttcatttttcttttatttatttatttattctttggaatctctgaagattcccttttttcattgaactccttcttggaaatgacacctatcatttatatctttacatataagacatgaaaattgtcatatagaaataggaatatctcttaaaccataagattattctgttgcaaaatgttttcttctccccatcactttttctttttaatatttttattttctggctccaagtccaagcaataattaatgggaccctttttactttttcatggatagtaaatatataaataaggaatgtaatgtaatacaaaaacattacaacttctcttcttggagtatagttgcatttttttcatccataatcttttccttgaggttaatcttcttttctaatttgccttgaaaatgactgaattatatttgattttactttttctgttagtatgaattactaaaccagaaatccattgccatttcctttagtagtataattcattctggttgaagagaaaaattagaagaaaatatttgcatacattaaggcattagttttgatggcatgtttgcaaaaaattgatgtatcataattgcttctgggccctcactgatatatgattttgtcattgtgtatttgtgtttggtttatgatagtttctgtttttgcatgtcaacctcacacgtatactaatacaagtgaacctcagaatcatgccccttacaactatattatagtgtgaaattaatgtttctgtgcatgtgtcatgtgagtctgtgacactgctaccaccatccaaaatccaaagaagttgtgtgtgttgtagtggttaacccttgacacactcttcatgctcttttgctctgtccttcattatagaagatgcatgctttcttgtcaattgaagggtgcaaaacatcatcactcatactagtcacttggcatgataagctaaattgtgatatttgaatgccacatgtgtttggaaattggtgtctattgtgttatgcattttcacatcctttcttttcttttctctatttttataggattcccaaggcataatagaacttcaaataactggttgtaatatcagaaatcctttctttgctgtttttctggtcatggtctaagtcactctcatctgcaatgactatcattcattcattttcttagatatcagaatcattagattactgattattgacttgctttgtagtagtgcaaagtgctaactctttctttctacattggtaacaggagctttaacaacacaacaatgggagctggagggcgtgtcactaagattgaagctcaaaagaagcctctttcaagggttccacattcaaaccctccattcagtgttggccaactcaagaaagcaattccaccacattgctttgaacgttctcttttcatatcattctcctatgttgtctatgatctcttagtggcctacttactcttctacattgccaccacttatttccacaagcttccatacccattttccttccttgcttggccaatctattgggccatccaaggctgcattctcactggtgtttgggtgattgctcatgagtgtggccaccatgccttcagcaagtaccaacttgttgatgacatggttggtttgacccttcactcttgtctattagttccttatttctcatggaaaatcagccaccgccgccaccactccaacaccggttccctcgaccgcaacgaagtgtttgtcccaaaaccaaaatcaaaggtatcatggtataacaagtacatgaacaatccaccagggagggctatctccctcttcatcacactcacactaggatggcccttgtacttggccttcaatgtttctggcagaccctatgatagatttgcaagccactatgacccttatgctcccatatactctaacagggaaaggcttctaatttatgtctcagattcatctgtctttgctgtaacatatctgctatatcacatagcaactctgaaaggtttgggttgggtggtatgtgtttatggggtgccattgctcattgtgaatgggtttctagttaccataacctatttgcagcacacacatgcatcattgcctcactatgattcatccgaatgggactggttaagaggagcattggcaacagtggacagagattatgggatactgaataaggcatttcatcatataactgatacgcatgtggctcatcatttgttctcaacaatgcctcattaccatgcaatggaagcaaccaatgcaataaagccaatattgggtgattactaccaatttgatggcaccccattttacaaagcattgtggagagaagccaaagagtgcctctatgtggagccagatgatggagcttctaagaagggtgtttattggtacaagaacaagttctgatgcatagtcagagttgaaaacgtttgtgttaaattagaaacttaagtactttagtaacttgtaatggtcatcaacaataataaacaatgtgtgtgtggatttgccatgtaatgtactactactactactactagtttttgtgaactactagtttggagtgacttgtgatcatagatttatttaatgcaatattgctattgtgctaagcattttgaaaa

SEQ ID NO: 3810 - protein, 421 aa, Arachis hypogaea
MDSKYINKECNVIQKHYNFSSWSIVAFFSSIIFSLRSFNNTTMGAGGRVTKIEAQKKPLSRVPHSNPPFSVGQLKKAIPPHCFERSLFISFSYVVYDLLVAYLLFYIATTYFHKLPYPFSFLAWPIYWAIQGCILTGVWVIAHECGHHAFSKYQLVDDMVGLTLHSCLLVPYFSWKISHRRHHSNTGSLDRNEVFVPKPKSKVSWYNKYMNNPPGRAISLFITLTLGWPLYLAFNVSGRPYDRFASHYDPYAPIYSNRERLLIYVSDSSVFAVTYLLYHIATLKGLGWVVCVYGVPLLIVNGFLVTITYLQHTHASLPHYDSSEWDWLRGALATVDRDYGILNKAFHHITDTHVAHHLFSTMPHYHAMEATNAIKPILGDYYQFDGTPFYKALWREAKECLYVEPDDGASKKGVYWYKNKF

SEQ ID NO: 3811 - DNA, 20 bp, Arachis hypogaea
  source 1..20: mol_type = other DNA
tagctagagtggcgaagtga

SEQ ID NO: 3812 - DNA, 20 bp, Arachis hypogaea
  source 1..20: mol_type = other DNA
accacaggaagtagctagag

SEQ ID NO: 3813 - DNA, 20 bp, Arachis hypogaea
  source 1..20: mol_type = other DNA
gccactctagctacttcctg

SEQ ID NO: 3814 - DNA, 20 bp, Arachis hypogaea
  source 1..20: mol_type = other DNA
actctagctacttcctgtgg

SEQ ID NO: 3815 - DNA, 20 bp, Arachis hypogaea
  source 1..20: mol_type = other DNA
tgattctgctcaaccaccac

SEQ ID NO: 3816 - DNA, 20 bp, Arachis hypogaea
  source 1..20: mol_type = other DNA
caaagaagatctttggagga

SEQ ID NO: 3817 - DNA, 20 bp, Arachis hypogaea
  source 1..20: mol_type = other DNA
ccagcaaagaagatctttgg

SEQ ID NO: 3818 - DNA, 20 bp, Arachis hypogaea
  source 1..20: mol_type = other DNA
cggccagcaaagaagatctt

SEQ ID NO: 3819 - DNA, 20 bp, Arachis hypogaea
  source 1..20: mol_type = other DNA
cctccaaagatcttctttgc

SEQ ID NO: 3820 - DNA, 20 bp, Arachis hypogaea
  source 1..20: mol_type = other DNA
caaaaagaaagatgaagatt

SEQ ID NO: 3821 - DNA, 20 bp, Arachis hypogaea
  source 1..20: mol_type = other DNA
atctttctttttgagtatga

SEQ ID NO: 3822 - DNA, 20 bp, Arachis hypogaea
  source 1..20: mol_type = other DNA
aagatttagtgacgtaatct

SEQ ID NO: 3823 - DNA, 20 bp, Arachis hypogaea
  source 1..20: mol_type = other DNA
cactaaatcttgccactttt

SEQ ID NO: 3824 - DNA, 20 bp, Arachis hypogaea
  source 1..20: mol_type = other DNA
ctgagataatcaccaaaaag

SEQ ID NO: 3825 - DNA, 20 bp, Arachis hypogaea
  source 1..20: mol_type = other DNA
agaaaaccaaaagtatgttg

SEQ ID NO: 3826 - DNA, 20 bp, Arachis hypogaea
  source 1..20: mol_type = other DNA
tctcagccacaacatacttt

SEQ ID NO: 3827 - DNA, 20 bp, Arachis hypogaea
  source 1..20: mol_type = other DNA
ctatcaagttaatgatggca

SEQ ID NO: 3828 - DNA, 20 bp, Arachis hypogaea
  source 1..20: mol_type = other DNA
caagtctatcaagttaatga

SEQ ID NO: 3829 - DNA, 20 bp, Arachis hypogaea
  source 1..20: mol_type = other DNA
cagcttcttctttttctttt

SEQ ID NO: 3830 - DNA, 20 bp, Arachis hypogaea
  source 1..20: mol_type = other DNA
ggttattacacaggaaacta

SEQ ID NO: 3831 - DNA, 20 bp, Arachis hypogaea
  source 1..20: mol_type = other DNA
atcttcttcggttattacac

SEQ ID NO: 3832 - DNA, 20 bp, Arachis hypogaea
  source 1..20: mol_type = other DNA
tcatctttgcttatcttctt

SEQ ID NO: 3833 - DNA, 20 bp, Arachis hypogaea
  source 1..20: mol_type = other DNA
gataagcaaagatgagagag

SEQ ID NO: 3834 - DNA, 20 bp, Arachis hypogaea
  source 1..20: mol_type = other DNA
gaaatttgaacactagctaa

SEQ ID NO: 3835 - DNA, 20 bp, Arachis hypogaea
  source 1..20: mol_type = other DNA
aaatttgaacactagctaat

SEQ ID NO: 3836 - DNA, 20 bp, Arachis hypogaea
  source 1..20: mol_type = other DNA
ctaccttatgcaagggaagc

SEQ ID NO: 3837 - DNA, 20 bp, Arachis hypogaea
  source 1..20: mol_type = other DNA
ctgcacgctaccttatgcaa

SEQ ID NO: 3838 - DNA, 20 bp, Arachis hypogaea
  source 1..20: mol_type = other DNA
agtccagcttcccttgcata

SEQ ID NO: 3839 - DNA, 20 bp, Arachis hypogaea
  source 1..20: mol_type = other DNA
gctgcacgctaccttatgca

SEQ ID NO: 3840 - DNA, 20 bp, Arachis hypogaea
  source 1..20: mol_type = other DNA
taaggtagcgtgcagcacaa

SEQ ID NO: 3841 - DNA, 20 bp, Arachis hypogaea
  source 1..20: mol_type = other DNA
caatggcaatcaatcaattc

SEQ ID NO: 3842 - DNA, 20 bp, Arachis hypogaea
  source 1..20: mol_type = other DNA
taaattgccatttattgcat

SEQ ID NO: 3843 - DNA, 20 bp, Arachis hypogaea
  source 1..20: mol_type = other DNA
ttaaattgccatttattgca

SEQ ID NO: 3844 - DNA, 20 bp, Arachis hypogaea
  source 1..20: mol_type = other DNA
catgtttcccatgcaataaa

SEQ ID NO: 3845 - DNA, 20 bp, Arachis hypogaea
  source 1..20: mol_type = other DNA
aatggcaatttaatgaaatt

SEQ ID NO: 3846 - DNA, 20 bp, Arachis hypogaea
  source 1..20: mol_type = other DNA
gaaatttggaatccatcaca

SEQ ID NO: 3847 - DNA, 20 bp, Arachis hypogaea
  source 1..20: mol_type = other DNA
acaagcattataccatgtga

SEQ ID NO: 3848 - DNA, 20 bp, Arachis hypogaea
  source 1..20: mol_type = other DNA
ggtataatgcttgtatccgt

SEQ ID NO: 3849 - DNA, 20 bp, Arachis hypogaea
  source 1..20: mol_type = other DNA
catttgcctcatgcttccaa

SEQ ID NO: 3850 - DNA, 20 bp, Arachis hypogaea
  source 1..20: mol_type = other DNA
ttgtatccgttggaagcatg

SEQ ID NO: 3851 - DNA, 20 bp, Arachis hypogaea
  source 1..20: mol_type = other DNA
gttaacatttgctttcctga

SEQ ID NO: 3852 - DNA, 20 bp, Arachis hypogaea
  source 1..20: mol_type = other DNA
tgcttgatttcaaatccatc

SEQ ID NO: 3853 - DNA, 20 bp, Arachis hypogaea
  source 1..20: mol_type = other DNA
atggatttgaaatcaagcat

SEQ ID NO: 3854 - DNA, 20 bp, Arachis hypogaea
  source 1..20: mol_type = other DNA
tcttaagcatataacacagt

SEQ ID NO: 3855 - DNA, 20 bp, Arachis hypogaea
  source 1..20: mol_type = other DNA
cttaagcatataacacagtt

SEQ ID NO: 3856 - DNA, 20 bp, Arachis hypogaea
  source 1..20: mol_type = other DNA
gcatataacacagttgggct

SEQ ID NO: 3857 - DNA, 20 bp, Arachis hypogaea
  source 1..20: mol_type = other DNA
tacttgggctagaatgattt

SEQ ID NO: 3858 - DNA, 20 bp, Arachis hypogaea
  source 1..20: mol_type = other DNA
gaatggaaaataaactactt

SEQ ID NO: 3859 - DNA, 20 bp, Arachis hypogaea
  source 1..20: mol_type = other DNA
tgaatggaaaataaactact

SEQ ID NO: 3860 - DNA, 20 bp, Arachis hypogaea
  source 1..20: mol_type = other DNA
gttagtttcttgtggctgaa

SEQ ID NO: 3861 - DNA, 20 bp, Arachis hypogaea
  source 1..20: mol_type = other DNA
taatatgagttagtttcttg

SEQ ID NO: 3862 - DNA, 20 bp, Arachis hypogaea
  source 1..20: mol_type = other DNA
atgctgaatattttaatcat

SEQ ID NO: 3863 - DNA, 20 bp, Arachis hypogaea
  source 1..20: mol_type = other DNA
tgctgaatattttaatcatt

SEQ ID NO: 3864 - DNA, 20 bp, Arachis hypogaea
  source 1..20: mol_type = other DNA
agcaacattttcttttattt

SEQ ID NO: 3865 - DNA, 20 bp, Arachis hypogaea
  source 1..20: mol_type = other DNA
acaatgtagtgttttaaatt

SEQ ID NO: 3866 - DNA, 20 bp, Arachis hypogaea
  source 1..20: mol_type = other DNA
gacaatgtagtgttttaaat

SEQ ID NO: 3867 - DNA, 20 bp, Arachis hypogaea
  source 1..20: mol_type = other DNA
ttaatttattgtgatcattg

SEQ ID NO: 3868 - DNA, 20 bp, Arachis hypogaea
  source 1..20: mol_type = other DNA
atcacaataaattaatatca

SEQ ID NO: 3869 - DNA, 20 bp, Arachis hypogaea
  source 1..20: mol_type = other DNA
ctgaaagttcataagcatat

SEQ ID NO: 3870 - DNA, 20 bp, Arachis hypogaea
  source 1..20: mol_type = other DNA
tgaaagttcataagcatatt

SEQ ID NO: 3871 - DNA, 20 bp, Arachis hypogaea
  source 1..20: mol_type = other DNA
ttgggccgaaaatgaaattc

SEQ ID NO: 3872 - DNA, 20 bp, Arachis hypogaea
  source 1..20: mol_type = other DNA
ttgcaccagaatttcatttt

SEQ ID NO: 3873 - DNA, 20 bp, Arachis hypogaea
  source 1..20: mol_type = other DNA
tgttgtgcagattttgagtt

SEQ ID NO: 3874 - DNA, 20 bp, Arachis hypogaea
  source 1..20: mol_type = other DNA
ttgttgtgcagattttgagt

SEQ ID NO: 3875 - DNA, 20 bp, Arachis hypogaea
  source 1..20: mol_type = other DNA
aaactctaatttaattttaa

SEQ ID NO: 3876 - DNA, 20 bp, Arachis hypogaea
  source 1..20: mol_type = other DNA
ttgatacaatttgatgagtt

SEQ ID NO: 3877 - DNA, 20 bp, Arachis hypogaea
  source 1..20: mol_type = other DNA
attgtatcaagagaagtcag

SEQ ID NO: 3878 - DNA, 20 bp, Arachis hypogaea
  source 1..20: mol_type = other DNA
caagagaagtcagaggtaaa

SEQ ID NO: 3879 - DNA, 20 bp, Arachis hypogaea
  source 1..20: mol_type = other DNA
gaaaatgatatgcatgtaga

SEQ ID NO: 3880 - DNA, 20 bp, Arachis hypogaea
  source 1..20: mol_type = other DNA
taacccaatttggagtgaca

SEQ ID NO: 3881 - DNA, 20 bp, Arachis hypogaea
  source 1..20: mol_type = other DNA
gtaacccaatttggagtgac

SEQ ID NO: 3882 - DNA, 20 bp, Arachis hypogaea
  source 1..20: mol_type = other DNA
aactccctgtcactccaaat

SEQ ID NO: 3883 - DNA, 20 bp, Arachis hypogaea
  source 1..20: mol_type = other DNA
actccctgtcactccaaatt

SEQ ID NO: 3884 - DNA, 20 bp, Arachis hypogaea
  source 1..20: mol_type = other DNA
ctttcctatgtaacccaatt

SEQ ID NO: 3885 - DNA, 20 bp, Arachis hypogaea
  source 1..20: mol_type = other DNA
cactccaaattgggttacat

SEQ ID NO: 3886 - DNA, 20 bp, Arachis hypogaea
  source 1..20: mol_type = other DNA
tcttcactgctgtgcatcta

SEQ ID NO: 3887 - DNA, 20 bp, Arachis hypogaea
  source 1..20: mol_type = other DNA
tctacggtcataagtgtgtc

SEQ ID NO: 3888 - DNA, 20 bp, Arachis hypogaea
  source 1..20: mol_type = other DNA
ctacggtcataagtgtgtct

SEQ ID NO: 3889 - DNA, 20 bp, Arachis hypogaea
  source 1..20: mol_type = other DNA
tacggtcataagtgtgtctg

SEQ ID NO: 3890 - DNA, 20 bp, Arachis hypogaea
  source 1..20: mol_type = other DNA
ttagccattgaaacacaact

SEQ ID NO: 3891 - DNA, 20 bp, Arachis hypogaea
  source 1..20: mol_type = other DNA
gggaccaagttgtgtttcaa

SEQ ID NO: 3892 - DNA, 20 bp, Arachis hypogaea
  source 1..20: mol_type = other DNA
gtgtttcaatggctaagata

SEQ ID NO: 3893 - DNA, 20 bp, Arachis hypogaea
  source 1..20: mol_type = other DNA
tgtttcaatggctaagatat

SEQ ID NO: 3894 - DNA, 20 bp, Arachis hypogaea
  source 1..20: mol_type = other DNA
gcataaacaagtattttcaa

SEQ ID NO: 3895 - DNA, 20 bp, Arachis hypogaea
  source 1..20: mol_type = other DNA
tttgttgaccgaaagctata

SEQ ID NO: 3896 - DNA, 20 bp, Arachis hypogaea
  source 1..20: mol_type = other DNA
ctttgttgaccgaaagctat

SEQ ID NO: 3897 - DNA, 20 bp, Arachis hypogaea
  source 1..20: mol_type = other DNA
ttatgctgccctatagcttt

SEQ ID NO: 3898 - DNA, 20 bp, Arachis hypogaea
  source 1..20: mol_type = other DNA
aatccccaaattagaagttg

SEQ ID NO: 3899 - DNA, 20 bp, Arachis hypogaea
  source 1..20: mol_type = other DNA
cagaaccacaacttctaatt

SEQ ID NO: 3900 - DNA, 20 bp, Arachis hypogaea
  source 1..20: mol_type = other DNA
agaaccacaacttctaattt

SEQ ID NO: 3901 - DNA, 20 bp, Arachis hypogaea
  source 1..20: mol_type = other DNA
gaaccacaacttctaatttg

SEQ ID NO: 3902 - DNA, 20 bp, Arachis hypogaea
  source 1..20: mol_type = other DNA
ggattaaatgaaaagtgacc

SEQ ID NO: 3903 - DNA, 20 bp, Arachis hypogaea
  source 1..20: mol_type = other DNA
gtgtgcttcaccaactcacc

SEQ ID NO: 3904 - DNA, 20 bp, Arachis hypogaea
  source 1..20: mol_type = other DNA
tgaaaagtgacctggtgagt

SEQ ID NO: 3905 - DNA, 20 bp, Arachis hypogaea
  source 1..20: mol_type = other DNA
ttggtgaagcacactgcttt

SEQ ID NO: 3906 - DNA, 20 bp, Arachis hypogaea
  source 1..20: mol_type = other DNA
tggtgaagcacactgcttta

SEQ ID NO: 3907 - DNA, 20 bp, Arachis hypogaea
  source 1..20: mol_type = other DNA
cactgctttagggttgacct

SEQ ID NO: 3908 - DNA, 20 bp, Arachis hypogaea
  source 1..20: mol_type = other DNA
ttgctgagttcctctctcct

SEQ ID NO: 3909 - DNA, 20 bp, Arachis hypogaea
  source 1..20: mol_type = other DNA
ttagggttgacctaggagag

SEQ ID NO: 3910 - DNA, 20 bp, Arachis hypogaea
  source 1..20: mol_type = other DNA
agaggaactcagcaacatgc

SEQ ID NO: 3911 - DNA, 20 bp, Arachis hypogaea
  source 1..20: mol_type = other DNA
gaggaactcagcaacatgca

SEQ ID NO: 3912 - DNA, 20 bp, Arachis hypogaea
  source 1..20: mol_type = other DNA
ttctcatcattctgaagcga

SEQ ID NO: 3913 - DNA, 20 bp, Arachis hypogaea
  source 1..20: mol_type = other DNA
gaacataaacttcaaaacac

SEQ ID NO: 3914 - DNA, 20 bp, Arachis hypogaea
  source 1..20: mol_type = other DNA
agacagtgctacctagtcaa

SEQ ID NO: 3915 - DNA, 20 bp, Arachis hypogaea
  source 1..20: mol_type = other DNA
ggcggaatgttcctttgact

SEQ ID NO: 3916 - DNA, 20 bp, Arachis hypogaea
  source 1..20: mol_type = other DNA
gatttagttcctcattctgg

SEQ ID NO: 3917 - DNA, 20 bp, Arachis hypogaea
  source 1..20: mol_type = other DNA
aggaacattccgccagaatg

SEQ ID NO: 3918 - DNA, 20 bp, Arachis hypogaea
  source 1..20: mol_type = other DNA
tgtgatttagttcctcattc

SEQ ID NO: 3919 - DNA, 20 bp, Arachis hypogaea
  source 1..20: mol_type = other DNA
agaatgaggaactaaatcac

SEQ ID NO: 3920 - DNA, 20 bp, Arachis hypogaea
  source 1..20: mol_type = other DNA
aaatcacaggcaagcaaatc

SEQ ID NO: 3921 - DNA, 20 bp, Arachis hypogaea
  source 1..20: mol_type = other DNA
tggttcatcacatagtaaag

SEQ ID NO: 3922 - DNA, 20 bp, Arachis hypogaea
  source 1..20: mol_type = other DNA
ttacaatctgtaaagcatga

SEQ ID NO: 3923 - DNA, 20 bp, Arachis hypogaea
  source 1..20: mol_type = other DNA
tatatttctgtagtttcttg

SEQ ID NO: 3924 - DNA, 20 bp, Arachis hypogaea
  source 1..20: mol_type = other DNA
ctgtagtttcttgaggtaaa

SEQ ID NO: 3925 - DNA, 20 bp, Arachis hypogaea
  source 1..20: mol_type = other DNA
ttcaagtaaaagtctaagag

SEQ ID NO: 3926 - DNA, 20 bp, Arachis hypogaea
  source 1..20: mol_type = other DNA
aagaaatctgaaatcactca

SEQ ID NO: 3927 - DNA, 20 bp, Arachis hypogaea
  source 1..20: mol_type = other DNA
tcttgtatcttgtacctgtg

SEQ ID NO: 3928 - DNA, 20 bp, Arachis hypogaea
  source 1..20: mol_type = other DNA
ctaagaaaagggtacctcac

SEQ ID NO: 3929 - DNA, 20 bp, Arachis hypogaea
  source 1..20: mol_type = other DNA
tgctaacccaactaagaaaa

SEQ ID NO: 3930 - DNA, 20 bp, Arachis hypogaea
  source 1..20: mol_type = other DNA
gtgctaacccaactaagaaa

SEQ ID NO: 3931 - DNA, 20 bp, Arachis hypogaea
  source 1..20: mol_type = other DNA
tgaggtacccttttcttagt

SEQ ID NO: 3932 - DNA, 20 bp, Arachis hypogaea
  source 1..20: mol_type = other DNA
gaggtacccttttcttagtt

SEQ ID NO: 3933 - DNA, 20 bp, Arachis hypogaea
  source 1..20: mol_type = other DNA
agcactaagagtgaagaatt

SEQ ID NO: 3934 - DNA, 20 bp, Arachis hypogaea
  source 1..20: mol_type = other DNA
agttttaacctaacttgact

SEQ ID NO: 3935 - DNA, 20 bp, Arachis hypogaea
  source 1..20: mol_type = other DNA
tagcataaccaagtcaagtt

SEQ ID NO: 3936 - DNA, 20 bp, Arachis hypogaea
  source 1..20: mol_type = other DNA
aaaagattgtgtcaattctg

SEQ ID NO: 3937 - DNA, 20 bp, Arachis hypogaea
  source 1..20: mol_type = other DNA
ttgtgtcaattctgtggaat

SEQ ID NO: 3938 - DNA, 20 bp, Arachis hypogaea
  source 1..20: mol_type = other DNA
agtctccaccacaacagtgg

SEQ ID NO: 3939 - DNA, 20 bp, Arachis hypogaea
  source 1..20: mol_type = other DNA
tgaaaattccaccactgttg

SEQ ID NO: 3940 - DNA, 20 bp, Arachis hypogaea
  source 1..20: mol_type = other DNA
tccagtctccaccacaacag

SEQ ID NO: 3941 - DNA, 20 bp, Arachis hypogaea
  source 1..20: mol_type = other DNA
aaattccaccactgttgtgg

SEQ ID NO: 3942 - DNA, 20 bp, Arachis hypogaea
  source 1..20: mol_type = other DNA
accactgttgtggtggagac

SEQ ID NO: 3943 - DNA, 20 bp, Arachis hypogaea
  source 1..20: mol_type = other DNA
ttgtggtggagactggacgt

SEQ ID NO: 3944 - DNA, 20 bp, Arachis hypogaea
  source 1..20: mol_type = other DNA
gacgtaggttgcattgcaca

SEQ ID NO: 3945 - DNA, 20 bp, Arachis hypogaea
  source 1..20: mol_type = other DNA
ttgcacaaggcaaccgaacc

SEQ ID NO: 3946 - DNA, 20 bp, Arachis hypogaea
  source 1..20: mol_type = other DNA
caccgtcatgtatcctggtt

SEQ ID NO: 3947 - DNA, 20 bp, Arachis hypogaea
  source 1..20: mol_type = other DNA
gctgacaccgtcatgtatcc

SEQ ID NO: 3948 - DNA, 20 bp, Arachis hypogaea
  source 1..20: mol_type = other DNA
aaccgaaccaggatacatga

SEQ ID NO: 3949 - DNA, 20 bp, Arachis hypogaea
  source 1..20: mol_type = other DNA
tcagaaaacagaacagaaca

SEQ ID NO: 3950 - DNA, 20 bp, Arachis hypogaea
  source 1..20: mol_type = other DNA
ttgtctcataaatttttcgc

SEQ ID NO: 3951 - DNA, 20 bp, Arachis hypogaea
  source 1..20: mol_type = other DNA
agattgcaagtttgtttaaa

SEQ ID NO: 3952 - DNA, 20 bp, Arachis hypogaea
  source 1..20: mol_type = other DNA
gattgcaagtttgtttaaaa

SEQ ID NO: 3953 - DNA, 20 bp, Arachis hypogaea
  source 1..20: mol_type = other DNA
ttttgcattaaagtaaaaga

SEQ ID NO: 3954 - DNA, 20 bp, Arachis hypogaea
  source 1..20: mol_type = other DNA
gtagaaggcttaaagaaagg

SEQ ID NO: 3955 - DNA, 20 bp, Arachis hypogaea
  source 1..20: mol_type = other DNA
tgtagaaggcttaaagaaag

SEQ ID NO: 3956 - DNA, 20 bp, Arachis hypogaea
  source 1..20: mol_type = other DNA
ttgtagaaggcttaaagaaa

SEQ ID NO: 3957 - DNA, 20 bp, Arachis hypogaea
  source 1..20: mol_type = other DNA
gttgtagaaggcttaaagaa

SEQ ID NO: 3958 - DNA, 20 bp, Arachis hypogaea
  source 1..20: mol_type = other DNA
atatttctgaaggttgtaga

SEQ ID NO: 3959 - DNA, 20 bp, Arachis hypogaea
  source 1..20: mol_type = other DNA
ataagtcataatatttctga

SEQ ID NO: 3960 - DNA, 20 bp, Arachis hypogaea
  source 1..20: mol_type = other DNA
tattttgattttcaatattt

SEQ ID NO: 3961 - DNA, 20 bp, Arachis hypogaea
  source 1..20: mol_type = other DNA
ttattttgattttcaatatt

SEQ ID NO: 3962 - DNA, 20 bp, Arachis hypogaea
  source 1..20: mol_type = other DNA
tatatatatatatatataga

SEQ ID NO: 3963 - DNA, 20 bp, Arachis hypogaea
  source 1..20: mol_type = other DNA
atatatatatatatatatag

SEQ ID NO: 3964 - DNA, 20 bp, Arachis hypogaea
  source 1..20: mol_type = other DNA
gagacatgaatttaaccctt

SEQ ID NO: 3965 - DNA, 20 bp, Arachis hypogaea
  source 1..20: mol_type = other DNA
cttacagataagttgccgaa

SEQ ID NO: 3966 - DNA, 20 bp, Arachis hypogaea
  source 1..20: mol_type = other DNA
acttacagataagttgccga

SEQ ID NO: 3967 - DNA, 20 bp, Arachis hypogaea
  source 1..20: mol_type = other DNA
aaacactacatgaatgattt

SEQ ID NO: 3968 - DNA, 20 bp, Arachis hypogaea
  source 1..20: mol_type = other DNA
atgtagtgtttatttttttg

SEQ ID NO: 3969 - DNA, 20 bp, Arachis hypogaea
  source 1..20: mol_type = other DNA
cttagaatgagataagttaa

SEQ ID NO: 3970 - DNA, 20 bp, Arachis hypogaea
  source 1..20: mol_type = other DNA
caaaaaacaagaaacattta

SEQ ID NO: 3971 - DNA, 20 bp, Arachis hypogaea
  source 1..20: mol_type = other DNA
aatgtttcttgttttttgat

SEQ ID NO: 3972 - DNA, 20 bp, Arachis hypogaea
  source 1..20: mol_type = other DNA
gtttcttgttttttgattgg

SEQ ID NO: 3973 - DNA, 20 bp, Arachis hypogaea
  source 1..20: mol_type = other DNA
tcttgttttttgattggtgg

SEQ ID NO: 3974 - DNA, 20 bp, Arachis hypogaea
  source 1..20: mol_type = other DNA
ttttgattggtggaggaatt

SEQ ID NO: 3975 - DNA, 20 bp, Arachis hypogaea
  source 1..20: mol_type = other DNA
aggaatttggtgttacaaat

SEQ ID NO: 3976 - DNA, 20 bp, Arachis hypogaea
  source 1..20: mol_type = other DNA
aaatcagtcgagctatttga

SEQ ID NO: 3977 - DNA, 20 bp, Arachis hypogaea
  source 1..20: mol_type = other DNA
aaaatcagtcgagctatttg

SEQ ID NO: 3978 - DNA, 20 bp, Arachis hypogaea
  source 1..20: mol_type = other DNA
gactgattttgattataatt

SEQ ID NO: 3979 - DNA, 20 bp, Arachis hypogaea
  source 1..20: mol_type = other DNA
tataatttggaatatttgaa

SEQ ID NO: 3980 - DNA, 20 bp, Arachis hypogaea
  source 1..20: mol_type = other DNA
gcactatttttagagactct

SEQ ID NO: 3981 - DNA, 20 bp, Arachis hypogaea
  source 1..20: mol_type = other DNA
cataattgcttaagttaaac

SEQ ID NO: 3982 - DNA, 20 bp, Arachis hypogaea
  source 1..20: mol_type = other DNA
attttgtttatcttaacttt

SEQ ID NO: 3983 - DNA, 20 bp, Arachis hypogaea
  source 1..20: mol_type = other DNA
aaaaaaaaaaaaaacttatt

SEQ ID NO: 3984 - DNA, 20 bp, Arachis hypogaea
  source 1..20: mol_type = other DNA
aaaaaaaaaaaaacttatta

SEQ ID NO: 3985 - DNA, 20 bp, Arachis hypogaea
  source 1..20: mol_type = other DNA
tattagggttgatgctaaat

SEQ ID NO: 3986 - DNA, 20 bp, Arachis hypogaea
  source 1..20: mol_type = other DNA
tagggttgatgctaaattgg

SEQ ID NO: 3987 - DNA, 20 bp, Arachis hypogaea
  source 1..20: mol_type = other DNA
agggttgatgctaaattggt

SEQ ID NO: 3988 - DNA, 20 bp, Arachis hypogaea
  source 1..20: mol_type = other DNA
acaagttaaggtattttagt

SEQ ID NO: 3989 - DNA, 20 bp, Arachis hypogaea
  source 1..20: mol_type = other DNA
tttcgagttacaacaagtta

SEQ ID NO: 3990 - DNA, 20 bp, Arachis hypogaea
  source 1..20: mol_type = other DNA
actcacattgggtttttata

SEQ ID NO: 3991 - DNA, 20 bp, Arachis hypogaea
  source 1..20: mol_type = other DNA
cactcacattgggtttttat

SEQ ID NO: 3992 - DNA, 20 bp, Arachis hypogaea
  source 1..20: mol_type = other DNA
gttgttgtctcactcacatt

SEQ ID NO: 3993 - DNA, 20 bp, Arachis hypogaea
  source 1..20: mol_type = other DNA
agttgttgtctcactcacat

SEQ ID NO: 3994 - DNA, 20 bp, Arachis hypogaea
  source 1..20: mol_type = other DNA
attacataaaaccttaaacg

SEQ ID NO: 3995 - DNA, 20 bp, Arachis hypogaea
  source 1..20: mol_type = other DNA
gaatctcgcagccacgttta

SEQ ID NO: 3996 - DNA, 20 bp, Arachis hypogaea
  source 1..20: mol_type = other DNA
gtggctgcgagattcatcat

SEQ ID NO: 3997 - DNA, 20 bp, Arachis hypogaea
  source 1..20: mol_type = other DNA
ctcacttctcttctctctgt

SEQ ID NO: 3998 - DNA, 20 bp, Arachis hypogaea
  source 1..20: mol_type = other DNA
ctctgttggaattgctttca

SEQ ID NO: 3999 - DNA, 20 bp, Arachis hypogaea
  source 1..20: mol_type = other DNA
gcagaatgttttataattaa

SEQ ID NO: 4000 - DNA, 20 bp, Arachis hypogaea
  source 1..20: mol_type = other DNA
aaaaattgaactcgtgttgc

SEQ ID NO: 4001 - DNA, 20 bp, Arachis hypogaea
  source 1..20: mol_type = other DNA
gcatgttgatgttatagaaa

SEQ ID NO: 4002 - DNA, 20 bp, Arachis hypogaea
  source 1..20: mol_type = other DNA
ataacatcaacatgcatgct

SEQ ID NO: 4003 - DNA, 20 bp, Arachis hypogaea
  source 1..20: mol_type = other DNA
tcaaaattcagaaaaattca

SEQ ID NO: 4004 - DNA, 20 bp, Arachis hypogaea
  source 1..20: mol_type = other DNA
ttttctgaattttgaagcaa

SEQ ID NO: 4005 - DNA, 20 bp, Arachis hypogaea
  source 1..20: mol_type = other DNA
tttctgaattttgaagcaaa

SEQ ID NO: 4006 - DNA, 20 bp, Arachis hypogaea
  source 1..20: mol_type = other DNA
ttctgaattttgaagcaaag

SEQ ID NO: 4007 - DNA, 20 bp, Arachis hypogaea
  source 1..20: mol_type = other DNA
aattttgaagcaaaggggtg

SEQ ID NO: 4008 - DNA, 20 bp, Arachis hypogaea
  source 1..20: mol_type = other DNA
gaaatccagtagaaataaca

SEQ ID NO: 4009 - DNA, 20 bp, Arachis hypogaea
  source 1..20: mol_type = other DNA
ttcttccatgttatttctac

SEQ ID NO: 4010 - DNA, 20 bp, Arachis hypogaea
  source 1..20: mol_type = other DNA
ataacaaaactgtgtgtctg

SEQ ID NO: 4011 - DNA, 20 bp, Arachis hypogaea
  source 1..20: mol_type = other DNA
cacagttttgttatcccagc

SEQ ID NO: 4012 - DNA, 20 bp, Arachis hypogaea
  source 1..20: mol_type = other DNA
gaacggctatgaaaccagct

SEQ ID NO: 4013 - DNA, 20 bp, Arachis hypogaea
  source 1..20: mol_type = other DNA
cgaacggctatgaaaccagc

SEQ ID NO: 4014 - DNA, 20 bp, Arachis hypogaea
  source 1..20: mol_type = other DNA
aaagaaaaatgaaaaacgaa

SEQ ID NO: 4015 - DNA, 20 bp, Arachis hypogaea
  source 1..20: mol_type = other DNA
ttatttatttatttattctt

SEQ ID NO: 4016 - DNA, 20 bp, Arachis hypogaea
  source 1..20: mol_type = other DNA
gaaggagttcaatgaaaaaa

SEQ ID NO: 4017 - DNA, 20 bp, Arachis hypogaea
  source 1..20: mol_type = other DNA
agaaggagttcaatgaaaaa

SEQ ID NO: 4018 - DNA, 20 bp, Arachis hypogaea
  source 1..20: mol_type = other DNA
tttttcattgaactccttct

SEQ ID NO: 4019 - DNA, 20 bp, Arachis hypogaea
  source 1..20: mol_type = other DNA
gataggtgtcatttccaaga

SEQ ID NO: 4020 - DNA, 20 bp, Arachis hypogaea
  source 1..20: mol_type = other DNA
tatgtaaagatataaatgat

SEQ ID NO: 4021 - DNA, 20 bp, Arachis hypogaea
  source 1..20: mol_type = other DNA
gaaaattgtcatatagaaat

SEQ ID NO: 4022 - DNA, 20 bp, Arachis hypogaea
  source 1..20: mol_type = other DNA
tttgcaacagaataatctta

SEQ ID NO: 4023 - DNA, 20 bp, Arachis hypogaea
  source 1..20: mol_type = other DNA
attaaaaagaaaaagtgatg

SEQ ID NO: 4024 - DNA, 20 bp, Arachis hypogaea
  source 1..20: mol_type = other DNA
tattaaaaagaaaaagtgat

SEQ ID NO: 4025 - DNA, 20 bp, Arachis hypogaea
  source 1..20: mol_type = other DNA
atattaaaaagaaaaagtga

SEQ ID NO: 4026 - DNA, 20 bp, Arachis hypogaea
  source 1..20: mol_type = other DNA
tttttaatatttttattttc

SEQ ID NO: 4027 - DNA, 20 bp, Arachis hypogaea
  source 1..20: mol_type = other DNA
cattaattattgcttggact

SEQ ID NO: 4028 - DNA, 20 bp, Arachis hypogaea
  source 1..20: mol_type = other DNA
gggtcccattaattattgct

SEQ ID NO: 4029 - DNA, 20 bp, Arachis hypogaea
  source 1..20: mol_type = other DNA
caagtccaagcaataattaa

SEQ ID NO: 4030 - DNA, 20 bp, Arachis hypogaea
  source 1..20: mol_type = other DNA
aagtccaagcaataattaat

SEQ ID NO: 4031 - DNA, 20 bp, Arachis hypogaea
  source 1..20: mol_type = other DNA
tatccatgaaaaagtaaaaa

SEQ ID NO: 4032 - DNA, 20 bp, Arachis hypogaea
  source 1..20: mol_type = other DNA
ctatccatgaaaaagtaaaa

SEQ ID NO: 4033 - DNA, 20 bp, Arachis hypogaea
  source 1..20: mol_type = other DNA
ggaccctttttactttttca

SEQ ID NO: 4034 - DNA, 20 bp, Arachis hypogaea
  source 1..20: mol_type = other DNA
ggatagtaaatatataaata

SEQ ID NO: 4035 - DNA, 20 bp, Arachis hypogaea
  source 1..20: mol_type = other DNA
aacattacaacttctcttct

SEQ ID NO: 4036 - DNA, 20 bp, Arachis hypogaea
  source 1..20: mol_type = other DNA
taacctcaaggaaaagatta

SEQ ID NO: 4037 - DNA, 20 bp, Arachis hypogaea
  source 1..20: mol_type = other DNA
catccataatcttttccttg

SEQ ID NO: 4038 - DNA, 20 bp, Arachis hypogaea
  source 1..20: mol_type = other DNA
agaaaagaagattaacctca

SEQ ID NO: 4039 - DNA, 20 bp, Arachis hypogaea
  source 1..20: mol_type = other DNA
atataattcagtcattttca

SEQ ID NO: 4040 - DNA, 20 bp, Arachis hypogaea
  source 1..20: mol_type = other DNA
aggaaatggcaatggatttc

SEQ ID NO: 4041 - DNA, 20 bp, Arachis hypogaea
  source 1..20: mol_type = other DNA
actactaaaggaaatggcaa

SEQ ID NO: 4042 - DNA, 20 bp, Arachis hypogaea
  source 1..20: mol_type = other DNA
aattatactactaaaggaaa

SEQ ID NO: 4043 - DNA, 20 bp, Arachis hypogaea
  source 1..20: mol_type = other DNA
agaatgaattatactactaa

SEQ ID NO: 4044 - DNA, 20 bp, Arachis hypogaea
  source 1..20: mol_type = other DNA
tttagtagtataattcattc

SEQ ID NO: 4045 - DNA, 20 bp, Arachis hypogaea
  source 1..20: mol_type = other DNA
gaaaatatttgcatacatta

SEQ ID NO: 4046 - DNA, 20 bp, Arachis hypogaea
  source 1..20: mol_type = other DNA
cattaaggcattagttttga

SEQ ID NO: 4047 - DNA, 20 bp, Arachis hypogaea
  source 1..20: mol_type = other DNA
tgatgtatcataattgcttc

SEQ ID NO: 4048 - DNA, 20 bp, Arachis hypogaea
  source 1..20: mol_type = other DNA
gatgtatcataattgcttct

SEQ ID NO: 4049 - DNA, 20 bp, Arachis hypogaea
  source 1..20: mol_type = other DNA
acaaaatcatatatcagtga

SEQ ID NO: 4050 - DNA, 20 bp, Arachis hypogaea
  source 1..20: mol_type = other DNA
gacaaaatcatatatcagtg

SEQ ID NO: 4051 - DNA, 20 bp, Arachis hypogaea
  source 1..20: mol_type = other DNA
tgtcattgtgtatttgtgtt

SEQ ID NO: 4052 - DNA, 20 bp, Arachis hypogaea
  source 1..20: mol_type = other DNA
cttgtattagtatacgtgtg

SEQ ID NO: 4053 - DNA, 20 bp, Arachis hypogaea
  source 1..20: mol_type = other DNA
ttgtaaggggcatgattctg

SEQ ID NO: 4054 - DNA, 20 bp, Arachis hypogaea
  source 1..20: mol_type = other DNA
cactataatatagttgtaag

SEQ ID NO: 4055 - DNA, 20 bp, Arachis hypogaea
  source 1..20: mol_type = other DNA
acactataatatagttgtaa

SEQ ID NO: 4056 - DNA, 20 bp, Arachis hypogaea
  source 1..20: mol_type = other DNA
cacactataatatagttgta

SEQ ID NO: 4057 - DNA, 20 bp, Arachis hypogaea
  source 1..20: mol_type = other DNA
cttctttggattttggatgg

SEQ ID NO: 4058 - DNA, 20 bp, Arachis hypogaea
  source 1..20: mol_type = other DNA
caacttctttggattttgga

SEQ ID NO: 4059 - DNA, 20 bp, Arachis hypogaea
  source 1..20: mol_type = other DNA
cacacaacttctttggattt

SEQ ID NO: 4060 - DNA, 20 bp, Arachis hypogaea
  source 1..20: mol_type = other DNA
tacaacacacacaacttctt

SEQ ID NO: 4061 - DNA, 20 bp, Arachis hypogaea
  source 1..20: mol_type = other DNA
agaagttgtgtgtgttgtag

SEQ ID NO: 4062 - DNA, 20 bp, Arachis hypogaea
  source 1..20: mol_type = other DNA
gagcatgaagagtgtgtcaa

SEQ ID NO: 4063 - DNA, 20 bp, Arachis hypogaea
  source 1..20: mol_type = other DNA
agagcatgaagagtgtgtca

SEQ ID NO: 4064 - DNA, 20 bp, Arachis hypogaea
  source 1..20: mol_type = other DNA
gcatgcatcttctataatga

SEQ ID NO: 4065 - DNA, 20 bp, Arachis hypogaea
  source 1..20: mol_type = other DNA
catgctttcttgtcaattga

SEQ ID NO: 4066 - DNA, 20 bp, Arachis hypogaea
  source 1..20: mol_type = other DNA
atgctttcttgtcaattgaa

SEQ ID NO: 4067 - DNA, 20 bp, Arachis hypogaea
  source 1..20: mol_type = other DNA
catcactcatactagtcact

SEQ ID NO: 4068 - DNA, 20 bp, Arachis hypogaea
  source 1..20: mol_type = other DNA
caccaatttccaaacacatg

SEQ ID NO: 4069 - DNA, 20 bp, Arachis hypogaea
  source 1..20: mol_type = other DNA
atttgaatgccacatgtgtt

SEQ ID NO: 4070 - DNA, 20 bp, Arachis hypogaea
  source 1..20: mol_type = other DNA
tgccacatgtgtttggaaat

SEQ ID NO: 4071 - DNA, 20 bp, Arachis hypogaea
  source 1..20: mol_type = other DNA
aaatagagaaaagaaaagaa

SEQ ID NO: 4072 - DNA, 20 bp, Arachis hypogaea
  source 1..20: mol_type = other DNA
tttcttttctctatttttat

SEQ ID NO: 4073 - DNA, 20 bp, Arachis hypogaea
  source 1..20: mol_type = other DNA
ctatttttataggattccca

SEQ ID NO: 4074 - DNA, 20 bp, Arachis hypogaea
  source 1..20: mol_type = other DNA
ttgaagttctattatgcctt

SEQ ID NO: 4075 - DNA, 20 bp, Arachis hypogaea
  source 1..20: mol_type = other DNA
tttgaagttctattatgcct

SEQ ID NO: 4076 - DNA, 20 bp, Arachis hypogaea
  source 1..20: mol_type = other DNA
ataatagaacttcaaataac

SEQ ID NO: 4077 - DNA, 20 bp, Arachis hypogaea
  source 1..20: mol_type = other DNA
accagaaaaacagcaaagaa

SEQ ID NO: 4078 - DNA, 20 bp, Arachis hypogaea
  source 1..20: mol_type = other DNA
tcctttctttgctgtttttc

SEQ ID NO: 4079 - DNA, 20 bp, Arachis hypogaea
  source 1..20: mol_type = other DNA
ctttgctgtttttctggtca

SEQ ID NO: 4080 - DNA, 20 bp, Arachis hypogaea
  source 1..20: mol_type = other DNA
ctaactctttctttctacat

SEQ ID NO: 4081 - DNA, 20 bp, Arachis hypogaea
  source 1..20: mol_type = other DNA
tttctttctacattggtaac

SEQ ID NO: 4082 - DNA, 20 bp, Arachis hypogaea
  source 1..20: mol_type = other DNA
gagctttaacaacacaacaa

SEQ ID NO: 4083 - DNA, 20 bp, Arachis hypogaea
  source 1..20: mol_type = other DNA
agctttaacaacacaacaat

SEQ ID NO: 4084 - DNA, 20 bp, Arachis hypogaea
  source 1..20: mol_type = other DNA
aacaacacaacaatgggagc

SEQ ID NO: 4085 - DNA, 20 bp, Arachis hypogaea
  source 1..20: mol_type = other DNA
aacacaacaatgggagctgg

SEQ ID NO: 4086 - DNA, 20 bp, Arachis hypogaea
  source 1..20: mol_type = other DNA
acacaacaatgggagctgga

SEQ ID NO: 4087 - DNA, 20 bp, Arachis hypogaea
  source 1..20: mol_type = other DNA
ctcaaaagaagcctctttca

SEQ ID NO: 4088 - DNA, 20 bp, Arachis hypogaea
  source 1..20: mol_type = other DNA
gaatgtggaacccttgaaag

SEQ ID NO: 4089 - DNA, 20 bp, Arachis hypogaea
  source 1..20: mol_type = other DNA
tcaaaagaagcctctttcaa

SEQ ID NO: 4090 - DNA, 20 bp, Arachis hypogaea
  source 1..20: mol_type = other DNA
ctgaatggagggtttgaatg

SEQ ID NO: 4091 - DNA, 20 bp, Arachis hypogaea
  source 1..20: mol_type = other DNA
gttggccaacactgaatgga

SEQ ID NO: 4092 - DNA, 20 bp, Arachis hypogaea
  source 1..20: mol_type = other DNA
agttggccaacactgaatgg

SEQ ID NO: 4093 - DNA, 20 bp, Arachis hypogaea
  source 1..20: mol_type = other DNA
ttgagttggccaacactgaa

SEQ ID NO: 4094 - DNA, 20 bp, Arachis hypogaea
  source 1..20: mol_type = other DNA
tcaaaccctccattcagtgt

SEQ ID NO: 4095 - DNA, 20 bp, Arachis hypogaea
  source 1..20: mol_type = other DNA
gtggaattgctttcttgagt

SEQ ID NO: 4096 - DNA, 20 bp, Arachis hypogaea
  source 1..20: mol_type = other DNA
gaacgttcaaagcaatgtgg

SEQ ID NO: 4097 - DNA, 20 bp, Arachis hypogaea
  source 1..20: mol_type = other DNA
agagaacgttcaaagcaatg

SEQ ID NO: 4098 - DNA, 20 bp, Arachis hypogaea
  source 1..20: mol_type = other DNA
taagagatcatagacaacat

SEQ ID NO: 4099 - DNA, 20 bp, Arachis hypogaea
  source 1..20: mol_type = other DNA
tgttgtctatgatctcttag

SEQ ID NO: 4100 - DNA, 20 bp, Arachis hypogaea
  source 1..20: mol_type = other DNA
ggcaatgtagaagagtaagt

SEQ ID NO: 4101 - DNA, 20 bp, Arachis hypogaea
  source 1..20: mol_type = other DNA
aagcttgtggaaataagtgg

SEQ ID NO: 4102 - DNA, 20 bp, Arachis hypogaea
  source 1..20: mol_type = other DNA
tggaagcttgtggaaataag

SEQ ID NO: 4103 - DNA, 20 bp, Arachis hypogaea
  source 1..20: mol_type = other DNA
aaaatgggtatggaagcttg

SEQ ID NO: 4104 - DNA, 20 bp, Arachis hypogaea
  source 1..20: mol_type = other DNA
gcaaggaaggaaaatgggta

SEQ ID NO: 4105 - DNA, 6075 bp, Arachis hypogaea
  source 1..6075: mol_type = genomic DNA
aatattgacacttcattaagttattatgtttgcatgttaaacatattttggatataacactcgtttgacatgcgtgtcttcttgtttaattgtgttttaataaaaaattctttttctaacacatttagacatacttaaataccatcacatatcagcgtgtctaattttatttttaacatgtattcttgaaataaatttagaaataatatattattatttatagaaataaaaaatattttaaatactttatataatttaaaaaagacattaaaaatagttaaaaaattaatttatatttttatatcaatatattattaaaataacattacaattcatcttaaaaatactttatattttatgataaagtattattttggtcattaacatttgatccaaattctaatttggtctctaacttttcaaacattttatttctgtcctaaaaattttcaaacaggttcaatgtggtcctattgttaaatttgactctaatagttaatagaatgagtgatgtagatgttaataacgttaccaatcaagtcatatcttctttcatgtgttaaaagaaacataaccaaaacattcttgtaacacttctcgtcaattttttttttctacaaaactccaaattctaacaatcaatcattaacgcttcaaaatcaaagaaaaaacttttatattattgatcgttggtagatcaattttagttttacttacatattaaagttgaatattgacttttcaatataagaattatttgtatcaaatttaatggtgagataatattaaacccacttaaaaaaatttttgagcttaaaataagatgtttaaaaaattttgggactgaaataagattttgaaacgttatgaatcaaattagaattcggtccaaatattgaagatcaaaataatactttaccccatatatatatatatatatatatatatatatatatatatatatatatatatatatatatatatatatgttatcatattttataaaaatttaaaattcgtgtgtttacgtatcatgtgttatatcgtatccatgtttcatagaatttaagctcagacacgaatttaaccctttggtaacttatctgcaagtaagttttaaaatcacttatgcagggtctatttttctgtggagacgctaatctaatatagaagaaaagtcctttaacttacctcattccaagctttaaatgttccttgttctttgattagtggaggaattcggtgttacaaattggactttaaagaacaagtcctcaaagagctcgactgatttttattataattatttgaaaggagaggcttcggcgagtctttgagcatctctaggagtctctaaaagaagtgctagtaatatcatttaaattgaactaggaactatttattttaccttatgcatagtatctaagattttttttctactatttttctatgttattttcttctctcaatttcactcataaatatttaaaaattttctttatttatttttttatcttaatttttggatattatatttatttatttattgaataaaatattactattatcttaaaaaaaaaagtcttattagggttgatgctaaattggtgggttagatcatcattgatcattgatcacaccaactaaaataccttaacttgttgtaactcgaaatatagcacactgttttttagggtggcaacaggatgggtaagggcggatttttgctctactcgacctcgtcttgctgtacaacaactcgcatagaacctgccccatttctacccgtgggtagtaaaacgttgaaccctaactcgcccctatccgcctctataattattaaaattcaataaataaaataaattttcaaaatttatataaccatcatcacatacataacataaattaaataaaaaatttaaatataatataatattatcaattatttactaattattttacatatattatacatattatatattaaaattatatatattatatatatagcgagatgggtaagggcggatattacataaacccaaccccgccccatccctcccaagaacctaccccactaaaaatccgtcttgatgcgagatggataattacccgcccccaacaagtatggacgggtgggtagccgcgggtagggatggcaaaatttcccgagacgcggggatccctgcagggactgccccgaatggagatccgattatggggaattttccccatggggatggggatgggggacaaaattcccccgaagtaagcgcggggacccgagcggggattcccgccccgtccccgctattccccgaaatttatgaattccttgaatcatccttaatagtttatttctcatatatattttttagtcatttctcacacacacatatatagagaaacccaaaactcctaatctttatttgcataacccttcttcaattcagagatcactaaagttgtccatactctatccaacctctctgcagccaccccctcgtcacccttctcaccgcatcatcacacctcaccgtgccatcacccttactgcgtcgtaatttctatttgtggcgttccttttcgtaactttgtcgtcgtgtccattctcattctcctctctgttgccgcgtctctcacctcgtccattgttttatcctttggctcgtcgttgcgtcccccattgcgttatttcgaaagaagtcaccatcgtatcatttagactttttgtataaaatcttgcagtttttgtataagatagatacttgcagctctattcatatgaaaattaataattagttagaactattatgtagatggggaatggggtccccgcggggaatggggctccgtggggaatgaggatggggaccaatattcccccacggcggggaatgggggcggggatggggagcaaatctgagggcgggaatggcagggaggcatcccccgcccctgccctgccccattgacatccctagccgcgggttcggatagtattatataaaaacccaatgtgagtgagacaacaacttaacacattacataaaaccttaaacgtggctgcgagattcatcataggagaagcactcacttctcttctctctgttggaattgctttcacggtttgcactatgtcccttttattataaaactttcattatttctttgttctgcacttctgcttctgctcattgtattcttctatataattcatgcaaatcgctctaaaaaattgaactcgtgttgctggtttcttcttgtgtccatttctataacatcaacatgcatgcttggataacttcttattttgatcttttataataaccttggattttctgaattctgaagtaagggttggtgaagttttcttccatgttatgtctactggatttcagattctgcattaaacaatatcaatgagaatgctgacaaatttcttttatcctcagacacacagttttgttatctcagctggtttcatagccgtccgtttttcatttttcttttatttatttatttattctttggaatctctgaagattcccttttttcattgaactccttcttggaaatgacacctatcatttatatctttacatatatgacatgaaaattgtcatatagaaataggaatatctcttaaaccataagattattctgttgcaaaatgttttcttctccccatcactttttctttttaatatttttattttctggctccaagtccaagcaataattaatgggaccctttttactctttcatggatagtaaatatataaataaggaatgtaatgtaatacaaaaacaccacaacttctctttttggagtatagttgcaattttttttatccataatcttttccttgaggttaatattcttttctaatttgccttgtaaatgactgaattatatttgattttattttttctgttagtatgaattactaaaccagaaatccattgccatttcctttagtagtataattcattctggttgaagagaaaaattagaagaaaatatttgcatacattaaggcattagtaattgcttctgggccctcactgatatatgattttgtcattgtgtatttgtgtttggtttatgatagtttttgcatgtcaacctcacacgtatactaatacaagtgaacctcagaatcatgccccttacaactatatatatagtgtgaaattaatgtttctgtgcatgtgtcatgtgagtctgtgacactgctaccaccatccaaaatccaaacagttgtgtgtgttgtagtggttaacccctggcacactcttcaagctcttttgctctgtccctcattatagaagatgcatgctttcttgtcaaatgaagggtgcaaaacatcatcactcatactagtcacttggcatgataagctaaattgtgatatttgaatgccacatgtgtttggaaattggtgtctattgtgttaggcattttcacatcctttcttttcttttctctatttttataggattcccaaggcataatagaacttcaaataactggttgtaatatcagaaatcctttctttgctgtttttctggtcatggtttaagtcactctcatctgcaatgactatcattcattcattttcttagatatcagaaccattagctttgtagtagtgcaaagtgctaactctttctttctacattggtaacaggagctttaacaacacaacaatgggagctggagggcgtgtcactaagattgaagctcaaaagaagcctctttcaagggttccacattcaaaccctccattcagtgttggccaactcaagaaagcaattccaccacattgctttgaacgttctcttttcatatcattctcatatgttgtctatgatctcttaatggcctacttactcttctacattgccaccacttatttccacaagcttccatacccattttccttccttgcttggccaatctattgggccatccaaggctgcattctcaccggtgtttgggtgattgctcatgagtgtggccaccatgccttcagcaagtaccaacttgttgatgacatggttggtttgacccttcactcttgtctattagttccttatttctcatggaaaatcagccaccgccgccaccactccaacacaggttccctcgaccgcgacgaagtgtttgtcccgaaaccaaaatcaaaggtatcatggtataacaagtacatgaacaatccaccagggagggctatttcccttttcatcacactcacactaggatggcccttgtacttggccttcaatgtttctggcagaccctatgatagatttgcaagccactatgacccttatgctcccatatactctaacagggaaaggcttctaatttatgtctcagattcatctgtctttgctgtaacatatctgctatatcacatagcaactttgaaaggtttgggttgggtggtatgtgtttatggggtgccattgctcattgtgaatgggtttctagttaccataacctatttgcagcacacacatgcatcattgcctcactatgattcatccgaatgggactggttaagaggagcattggcaacagtggacagagattatgggatactgaataaggcatttcatcatataactgatacgcatgtggctcatcatttgttctcaacaatgcctcattaccatgcaatggaagcaaccaatgcaataaagccaatattgggtgattactaccaatttgatggcaccccagtttacaaagcattgtggagagaagccaaagagtgcctctatgtggagccagatgatggagcttctcagaagggtgtttattggtacaagaacaagttctgatgcatagtcagagttggaaacgtttgtgttaaattagaaacttaagtactttagtaacttgtaatggtcatcaacaaaaataaagaatgtgtgtgtggatttgccatgtaatgtactactactactagtactactagtttttgtgaaatactagcttggtgtgacttgtgatcatagatttatttaatgcaatattactattgtgctaagcattttgaaaa

SEQ ID NO: 4106 - protein, 394 aa, Arachis hypogaea
MHAFLSNEGSFNNTTMGAGGRVTKIEAQKKPLSRVPHSNPPFSVGQLKKAIPPHCFERSLFISFSYVVYDLLMAYLLFYIATTYFHKLPYPFSFLAWPIYWAIQGCILTGVWVIAHECGHHAFSKYQLVDDMVGLTLHSCLLVPYFSWKISHRRHHSNTGSLDRDEVFVPKPKSKVSWYNKYMNNPPGRAISLFITLTLGWPLYLAFNVSGRPYDRFASHYDPYAPIYSNRERLLIYVSDSSVFAVTYLLYHIATLKGLGWVVCVYGVPLLIVNGFLVTITYLQHTHASLPHYDSSEWDWLRGALATVDRDYGILNKAFHHITDTHVAHHLFSTMPHYHAMEATNAIKPILGDYYQFDGTPVYKALWREAKECLYVEPDDGASQKGVYWYKNKF

SEQ ID NO: 4107 - DNA, 20 bp, Arachis hypogaea
  source 1..20: mol_type = other DNA
tagctagagtggcgaagtga

SEQ ID NO: 4108 - DNA, 20 bp, Arachis hypogaea
  source 1..20: mol_type = other DNA
accacaggaagtagctagag

SEQ ID NO: 4109 - DNA, 20 bp, Arachis hypogaea
  source 1..20: mol_type = other DNA
gccactctagctacttcctg

SEQ ID NO: 4110 - DNA, 20 bp, Arachis hypogaea
  source 1..20: mol_type = other DNA
actctagctacttcctgtgg

SEQ ID NO: 4111 - DNA, 20 bp, Arachis hypogaea
  source 1..20: mol_type = other DNA
tgattctgctcaaccaccac

SEQ ID NO: 4112 - DNA, 20 bp, Arachis hypogaea
  source 1..20: mol_type = other DNA
caaagaagatctttggagga

SEQ ID NO: 4113 - DNA, 20 bp, Arachis hypogaea
  source 1..20: mol_type = other DNA
ccagcaaagaagatctttgg

SEQ ID NO: 4114 - DNA, 20 bp, Arachis hypogaea
  source 1..20: mol_type = other DNA
cggccagcaaagaagatctt

SEQ ID NO: 4115 - DNA, 20 bp, Arachis hypogaea
  source 1..20: mol_type = other DNA
cctccaaagatcttctttgc

SEQ ID NO: 4116 - DNA, 20 bp, Arachis hypogaea
  source 1..20: mol_type = other DNA
caaaaagaaagatgaagatt

SEQ ID NO: 4117 - DNA, 20 bp, Arachis hypogaea
  source 1..20: mol_type = other DNA
atctttctttttgagtatga

SEQ ID NO: 4118 - DNA, 20 bp, Arachis hypogaea
  source 1..20: mol_type = other DNA
aagatttagtgacgtaatct

SEQ ID NO: 4119 - DNA, 20 bp, Arachis hypogaea
  source 1..20: mol_type = other DNA
cactaaatcttgccactttt

SEQ ID NO: 4120 - DNA, 20 bp, Arachis hypogaea
  source 1..20: mol_type = other DNA
ctgagataatcaccaaaaag

SEQ ID NO: 4121 - DNA, 20 bp, Arachis hypogaea
  source 1..20: mol_type = other DNA
agaaaaccaaaagtatgttg

SEQ ID NO: 4122 - DNA, 20 bp, Arachis hypogaea
  source 1..20: mol_type = other DNA
tctcagccacaacatacttt

SEQ ID NO: 4123 - DNA, 20 bp, Arachis hypogaea
  source 1..20: mol_type = other DNA
ctatcaagttaatgatggca

SEQ ID NO: 4124 - DNA, 20 bp, Arachis hypogaea
  source 1..20: mol_type = other DNA
caagtctatcaagttaatga

SEQ ID NO: 4125 - DNA, 20 bp, Arachis hypogaea
  source 1..20: mol_type = other DNA
cagcttcttctttttctttt

SEQ ID NO: 4126 - DNA, 20 bp, Arachis hypogaea
  source 1..20: mol_type = other DNA
ggttattacacaggaaacta

SEQ ID NO: 4127 - DNA, 20 bp, Arachis hypogaea
  source 1..20: mol_type = other DNA
atcttcttcggttattacac

SEQ ID NO: 4128 - DNA, 20 bp, Arachis hypogaea
  source 1..20: mol_type = other DNA
tcatctttgcttatcttctt

SEQ ID NO: 4129 - DNA, 20 bp, Arachis hypogaea
  source 1..20: mol_type = other DNA
gataagcaaagatgagagag

SEQ ID NO: 4130 - DNA, 20 bp, Arachis hypogaea
  source 1..20: mol_type = other DNA
gaaatttgaacactagctaa

SEQ ID NO: 4131 - DNA, 20 bp, Arachis hypogaea
  source 1..20: mol_type = other DNA
aaatttgaacactagctaat

SEQ ID NO: 4132 - DNA, 20 bp, Arachis hypogaea
  source 1..20: mol_type = other DNA
ctaccttatgcaagggaagc

SEQ ID NO: 4133 - DNA, 20 bp, Arachis hypogaea
  source 1..20: mol_type = other DNA
ctgcacgctaccttatgcaa

SEQ ID NO: 4134 - DNA, 20 bp, Arachis hypogaea
  source 1..20: mol_type = other DNA
agtccagcttcccttgcata

SEQ ID NO: 4135 - DNA, 20 bp, Arachis hypogaea
  source 1..20: mol_type = other DNA
gctgcacgctaccttatgca

SEQ ID NO: 4136 - DNA, 20 bp, Arachis hypogaea
  source 1..20: mol_type = other DNA
taaggtagcgtgcagcacaa

SEQ ID NO: 4137 - DNA, 20 bp, Arachis hypogaea
  source 1..20: mol_type = other DNA
caatggcaatcaatcaattc

SEQ ID NO: 4138 - DNA, 20 bp, Arachis hypogaea
  source 1..20: mol_type = other DNA
taaattgccatttattgcat

SEQ ID NO: 4139 - DNA, 20 bp, Arachis hypogaea
  source 1..20: mol_type = other DNA
ttaaattgccatttattgca

SEQ ID NO: 4140 - DNA, 20 bp, Arachis hypogaea
  source 1..20: mol_type = other DNA
catgtttcccatgcaataaa

SEQ ID NO: 4141 - DNA, 20 bp, Arachis hypogaea
  source 1..20: mol_type = other DNA
aatggcaatttaatgaaatt

SEQ ID NO: 4142 - DNA, 20 bp, Arachis hypogaea
  source 1..20: mol_type = other DNA
gaaatttggaatccatcaca

SEQ ID NO: 4143 - DNA, 20 bp, Arachis hypogaea
  source 1..20: mol_type = other DNA
acaagcattataccatgtga

SEQ ID NO: 4144 - DNA, 20 bp, Arachis hypogaea
  source 1..20: mol_type = other DNA
ggtataatgcttgtatccgt

SEQ ID NO: 4145 - DNA, 20 bp, Arachis hypogaea
  source 1..20: mol_type = other DNA
catttgcctcatgcttccaa

SEQ ID NO: 4146 - DNA, 20 bp, Arachis hypogaea
  source 1..20: mol_type = other DNA
ttgtatccgttggaagcatg

SEQ ID NO: 4147 - DNA, 20 bp, Arachis hypogaea
  source 1..20: mol_type = other DNA
gttaacatttgctttcctga

SEQ ID NO: 4148 - DNA, 20 bp, Arachis hypogaea
  source 1..20: mol_type = other DNA
tgcttgatttcaaatccatc

SEQ ID NO: 4149 - DNA, 20 bp, Arachis hypogaea
  source 1..20: mol_type = other DNA
atggatttgaaatcaagcat

SEQ ID NO: 4150 - DNA, 20 bp, Arachis hypogaea
  source 1..20: mol_type = other DNA
tcttaagcatataacacagt

SEQ ID NO: 4151 - DNA, 20 bp, Arachis hypogaea
  source 1..20: mol_type = other DNA
cttaagcatataacacagtt

SEQ ID NO: 4152 - DNA, 20 bp, Arachis hypogaea
  source 1..20: mol_type = other DNA
gcatataacacagttgggct

SEQ ID NO: 4153 - DNA, 20 bp, Arachis hypogaea
  source 1..20: mol_type = other DNA
tacttgggctagaatgattt

SEQ ID NO: 4154 - DNA, 20 bp, Arachis hypogaea
  source 1..20: mol_type = other DNA
gaatggaaaataaactactt

SEQ ID NO: 4155 - DNA, 20 bp, Arachis hypogaea
  source 1..20: mol_type = other DNA
tgaatggaaaataaactact

SEQ ID NO: 4156 - DNA, 20 bp, Arachis hypogaea
  source 1..20: mol_type = other DNA
gttagtttcttgtggctgaa

SEQ ID NO: 4157 - DNA, 20 bp, Arachis hypogaea
  source 1..20: mol_type = other DNA
taatatgagttagtttcttg

SEQ ID NO: 4158 - DNA, 20 bp, Arachis hypogaea
  source 1..20: mol_type = other DNA
atgctgaatattttaatcat

SEQ ID NO: 4159 - DNA, 20 bp, Arachis hypogaea
  source 1..20: mol_type = other DNA
tgctgaatattttaatcatt

SEQ ID NO: 4160 - DNA, 20 bp, Arachis hypogaea
  source 1..20: mol_type = other DNA
agcaacattttcttttattt

SEQ ID NO: 4161 - DNA, 20 bp, Arachis hypogaea
  source 1..20: mol_type = other DNA
acaatgtagtgttttaaatt

SEQ ID NO: 4162 - DNA, 20 bp, Arachis hypogaea
  source 1..20: mol_type = other DNA
gacaatgtagtgttttaaat

SEQ ID NO: 4163 - DNA, 20 bp, Arachis hypogaea
  source 1..20: mol_type = other DNA
ttaatttattgtgatcattg

SEQ ID NO: 4164 - DNA, 20 bp, Arachis hypogaea
  source 1..20: mol_type = other DNA
atcacaataaattaatatca

SEQ ID NO: 4165 - DNA, 20 bp, Arachis hypogaea
  source 1..20: mol_type = other DNA
ctgaaagttcataagcatat

SEQ ID NO: 4166 - DNA, 20 bp, Arachis hypogaea
  source 1..20: mol_type = other DNA
tgaaagttcataagcatatt

SEQ ID NO: 4167 - DNA, 20 bp, Arachis hypogaea
  source 1..20: mol_type = other DNA
ttgggccgaaaatgaaattc

SEQ ID NO: 4168 - DNA, 20 bp, Arachis hypogaea
  source 1..20: mol_type = other DNA
ttgcaccagaatttcatttt

SEQ ID NO: 4169 - DNA, 20 bp, Arachis hypogaea
  source 1..20: mol_type = other DNA
tgttgtgcagattttgagtt

SEQ ID NO: 4170 - DNA, 20 bp, Arachis hypogaea
  source 1..20: mol_type = other DNA
ttgttgtgcagattttgagt

SEQ ID NO: 4171 - DNA, 20 bp, Arachis hypogaea
  source 1..20: mol_type = other DNA
aaactctaatttaattttaa

SEQ ID NO: 4172 - DNA, 20 bp, Arachis hypogaea
  source 1..20: mol_type = other DNA
ttgatacaatttgatgagtt

SEQ ID NO: 4173 - DNA, 20 bp, Arachis hypogaea
  source 1..20: mol_type = other DNA
attgtatcaagagaagtcag

SEQ ID NO: 4174 - DNA, 20 bp, Arachis hypogaea
  source 1..20: mol_type = other DNA
caagagaagtcagaggtaaa

SEQ ID NO: 4175 - DNA, 20 bp, Arachis hypogaea
  source 1..20: mol_type = other DNA
gaaaatgatatgcatgtaga

SEQ ID NO: 4176 - DNA, 20 bp, Arachis hypogaea
  source 1..20: mol_type = other DNA
taacccaatttggagtgaca

SEQ ID NO: 4177 - DNA, 20 bp, Arachis hypogaea
  source 1..20: mol_type = other DNA
gtaacccaatttggagtgac

SEQ ID NO: 4178 - DNA, 20 bp, Arachis hypogaea
  source 1..20: mol_type = other DNA
aactccctgtcactccaaat

SEQ ID NO: 4179 - DNA, 20 bp, Arachis hypogaea
  source 1..20: mol_type = other DNA
actccctgtcactccaaatt

SEQ ID NO: 4180 - DNA, 20 bp, Arachis hypogaea
  source 1..20: mol_type = other DNA
ctttcctatgtaacccaatt

SEQ ID NO: 4181 - DNA, 20 bp, Arachis hypogaea
  source 1..20: mol_type = other DNA
cactccaaattgggttacat

SEQ ID NO: 4182 - DNA, 20 bp, Arachis hypogaea
  source 1..20: mol_type = other DNA
tcttcactgctgtgcatcta

SEQ ID NO: 4183 - DNA, 20 bp, Arachis hypogaea
  source 1..20: mol_type = other DNA
tctacggtcataagtgtgtc

SEQ ID NO: 4184 - DNA, 20 bp, Arachis hypogaea
  source 1..20: mol_type = other DNA
ctacggtcataagtgtgtct

SEQ ID NO: 4185 - DNA, 20 bp, Arachis hypogaea
  source 1..20: mol_type = other DNA
tacggtcataagtgtgtctg

SEQ ID NO: 4186 - DNA, 20 bp, Arachis hypogaea
  source 1..20: mol_type = other DNA
ttagccattgaaacacaact

SEQ ID NO: 4187 - DNA, 20 bp, Arachis hypogaea
  source 1..20: mol_type = other DNA
gggaccaagttgtgtttcaa

SEQ ID NO: 4188 - DNA, 20 bp, Arachis hypogaea
  source 1..20: mol_type = other DNA
gtgtttcaatggctaagata

SEQ ID NO: 4189 - DNA, 20 bp, Arachis hypogaea
  source 1..20: mol_type = other DNA
tgtttcaatggctaagatat

SEQ ID NO: 4190 - DNA, 20 bp, Arachis hypogaea
  source 1..20: mol_type = other DNA
gcataaacaagtattttcaa

SEQ ID NO: 4191 - DNA, 20 bp, Arachis hypogaea
  source 1..20: mol_type = other DNA
tttgttgaccgaaagctata

SEQ ID NO: 4192 - DNA, 20 bp, Arachis hypogaea
  source 1..20: mol_type = other DNA
ctttgttgaccgaaagctat

SEQ ID NO: 4193 - DNA, 20 bp, Arachis hypogaea
  source 1..20: mol_type = other DNA
ttatgctgccctatagcttt

SEQ ID NO: 4194 - DNA, 20 bp, Arachis hypogaea
  source 1..20: mol_type = other DNA
aatccccaaattagaagttg

SEQ ID NO: 4195 - DNA, 20 bp, Arachis hypogaea
  source 1..20: mol_type = other DNA
cagaaccacaacttctaatt

SEQ ID NO: 4196 - DNA, 20 bp, Arachis hypogaea
  source 1..20: mol_type = other DNA
agaaccacaacttctaattt

SEQ ID NO: 4197 - DNA, 20 bp, Arachis hypogaea
  source 1..20: mol_type = other DNA
gaaccacaacttctaatttg

SEQ ID NO: 4198 - DNA, 20 bp, Arachis hypogaea
  source 1..20: mol_type = other DNA
ggattaaatgaaaagtgacc

SEQ ID NO: 4199 - DNA, 20 bp, Arachis hypogaea
  source 1..20: mol_type = other DNA
gtgtgcttcaccaactcacc

SEQ ID NO: 4200 - DNA, 20 bp, Arachis hypogaea
  source 1..20: mol_type = other DNA
tgaaaagtgacctggtgagt

SEQ ID NO: 4201 - DNA, 20 bp, Arachis hypogaea
  source 1..20: mol_type = other DNA
ttggtgaagcacactgcttt

SEQ ID NO: 4202 - DNA, 20 bp, Arachis hypogaea
  source 1..20: mol_type = other DNA
tggtgaagcacactgcttta

SEQ ID NO: 4203 - DNA, 20 bp, Arachis hypogaea
  source 1..20: mol_type = other DNA
cactgctttagggttgacct

SEQ ID NO: 4204 - DNA, 20 bp, Arachis hypogaea
  source 1..20: mol_type = other DNA
ttgctgagttcctctctcct

SEQ ID NO: 4205 - DNA, 20 bp, Arachis hypogaea
  source 1..20: mol_type = other DNA
ttagggttgacctaggagag

SEQ ID NO: 4206 - DNA, 20 bp, Arachis hypogaea
  source 1..20: mol_type = other DNA
agaggaactcagcaacatgc

SEQ ID NO: 4207 - DNA, 20 bp, Arachis hypogaea
  source 1..20: mol_type = other DNA
gaggaactcagcaacatgca

SEQ ID NO: 4208 - DNA, 20 bp, Arachis hypogaea
  source 1..20: mol_type = other DNA
ttctcatcattctgaagcga

SEQ ID NO: 4209 - DNA, 20 bp, Arachis hypogaea
  source 1..20: mol_type = other DNA
gaacataaacttcaaaacac

SEQ ID NO: 4210 - DNA, 20 bp, Arachis hypogaea
  source 1..20: mol_type = other DNA
agacagtgctacctagtcaa

SEQ ID NO: 4211 - DNA, 20 bp, Arachis hypogaea
  source 1..20: mol_type = other DNA
ggcggaatgttcctttgact

SEQ ID NO: 4212 - DNA, 20 bp, Arachis hypogaea
  source 1..20: mol_type = other DNA
gatttagttcctcattctgg

SEQ ID NO: 4213 - DNA, 20 bp, Arachis hypogaea
  source 1..20: mol_type = other DNA
aggaacattccgccagaatg

SEQ ID NO: 4214 - DNA, 20 bp, Arachis hypogaea
  source 1..20: mol_type = other DNA
tgtgatttagttcctcattc

SEQ ID NO: 4215 - DNA, 20 bp, Arachis hypogaea
  source 1..20: mol_type = other DNA
agaatgaggaactaaatcac

SEQ ID NO: 4216 - DNA, 20 bp, Arachis hypogaea
  source 1..20: mol_type = other DNA
aaatcacaggcaagcaaatc

SEQ ID NO: 4217 - DNA, 20 bp, Arachis hypogaea
  source 1..20: mol_type = other DNA
tggttcatcacatagtaaag

SEQ ID NO: 4218 - DNA, 20 bp, Arachis hypogaea
  source 1..20: mol_type = other DNA
ttacaatctgtaaagcatga

SEQ ID NO: 4219 - DNA, 20 bp, Arachis hypogaea
  source 1..20: mol_type = other DNA
tatatttctgtagtttcttg

SEQ ID NO: 4220 - DNA, 20 bp, Arachis hypogaea
  source 1..20: mol_type = other DNA
ctgtagtttcttgaggtaaa

SEQ ID NO: 4221 - DNA, 20 bp, Arachis hypogaea
  source 1..20: mol_type = other DNA
ttcaagtaaaagtctaagag

SEQ ID NO: 4222 - DNA, 20 bp, Arachis hypogaea
  source 1..20: mol_type = other DNA
aagaaatctgaaatcactca

SEQ ID NO: 4223 - DNA, 20 bp, Arachis hypogaea
  source 1..20: mol_type = other DNA
tcttgtatcttgtacctgtg

SEQ ID NO: 4224 - DNA, 20 bp, Arachis hypogaea
  source 1..20: mol_type = other DNA
ctaagaaaagggtacctcac

SEQ ID NO: 4225 - DNA, 20 bp, Arachis hypogaea
  source 1..20: mol_type = other DNA
tgctaacccaactaagaaaa

SEQ ID NO: 4226 - DNA, 20 bp, Arachis hypogaea
  source 1..20: mol_type = other DNA
gtgctaacccaactaagaaa

SEQ ID NO: 4227 - DNA, 20 bp, Arachis hypogaea
  source 1..20: mol_type = other DNA
tgaggtacccttttcttagt

SEQ ID NO: 4228 - DNA, 20 bp, Arachis hypogaea
  source 1..20: mol_type = other DNA
gaggtacccttttcttagtt

SEQ ID NO: 4229 - DNA, 20 bp, Arachis hypogaea
  source 1..20: mol_type = other DNA
agcactaagagtgaagaatt

SEQ ID NO: 4230 - DNA, 20 bp, Arachis hypogaea
  source 1..20: mol_type = other DNA
agttttaacctaacttgact

SEQ ID NO: 4231 - DNA, 20 bp, Arachis hypogaea
  source 1..20: mol_type = other DNA
tagcataaccaagtcaagtt

SEQ ID NO: 4232 - DNA, 20 bp, Arachis hypogaea
  source 1..20: mol_type = other DNA
aaaagattgtgtcaattctg

SEQ ID NO: 4233 - DNA, 20 bp, Arachis hypogaea
  source 1..20: mol_type = other DNA
ttgtgtcaattctgtggaat

SEQ ID NO: 4234 - DNA, 20 bp, Arachis hypogaea
  source 1..20: mol_type = other DNA
agtctccaccacaacagtgg

SEQ ID NO: 4235 - DNA, 20 bp, Arachis hypogaea
  source 1..20: mol_type = other DNA
tgaaaattccaccactgttg

SEQ ID NO: 4236 - DNA, 20 bp, Arachis hypogaea
  source 1..20: mol_type = other DNA
tccagtctccaccacaacag

SEQ ID NO: 4237 - DNA, 20 bp, Arachis hypogaea
  source 1..20: mol_type = other DNA
aaattccaccactgttgtgg

SEQ ID NO: 4238 - DNA, 20 bp, Arachis hypogaea
  source 1..20: mol_type = other DNA
accactgttgtggtggagac

SEQ ID NO: 4239 - DNA, 20 bp, Arachis hypogaea
  source 1..20: mol_type = other DNA
ttgtggtggagactggacgt

SEQ ID NO: 4240 - DNA, 20 bp, Arachis hypogaea
  source 1..20: mol_type = other DNA
gacgtaggttgcattgcaca

SEQ ID NO: 4241 - DNA, 20 bp, Arachis hypogaea
  source 1..20: mol_type = other DNA
ttgcacaaggcaaccgaacc

SEQ ID NO: 4242 - DNA, 20 bp, Arachis hypogaea
  source 1..20: mol_type = other DNA
caccgtcatgtatcctggtt

SEQ ID NO: 4243 - DNA, 20 bp, Arachis hypogaea
  source 1..20: mol_type = other DNA
gctgacaccgtcatgtatcc

SEQ ID NO: 4244 - DNA, 20 bp, Arachis hypogaea
  source 1..20: mol_type = other DNA
aaccgaaccaggatacatga

SEQ ID NO: 4245 - DNA, 20 bp, Arachis hypogaea
  source 1..20: mol_type = other DNA
tcagaaaacagaacagaaca

SEQ ID NO: 4246 - DNA, 20 bp, Arachis hypogaea
  source 1..20: mol_type = other DNA
ttgtctcataaatttttcgc

SEQ ID NO: 4247 - DNA, 20 bp, Arachis hypogaea
  source 1..20: mol_type = other DNA
agattgcaagtttgtttaaa

SEQ ID NO: 4248 - DNA, 20 bp, Arachis hypogaea
  source 1..20: mol_type = other DNA
gattgcaagtttgtttaaaa

SEQ ID NO: 4249 - DNA, 20 bp, Arachis hypogaea
  source 1..20: mol_type = other DNA
ttttgcattaaagtaaaaga

SEQ ID NO: 4250 - DNA, 20 bp, Arachis hypogaea
  source 1..20: mol_type = other DNA
gtagaaggcttaaagaaagg

SEQ ID NO: 4251 - DNA, 20 bp, Arachis hypogaea
  source 1..20: mol_type = other DNA
tgtagaaggcttaaagaaag

SEQ ID NO: 4252 - DNA, 20 bp, Arachis hypogaea
  source 1..20: mol_type = other DNA
ttgtagaaggcttaaagaaa

SEQ ID NO: 4253 - DNA, 20 bp, Arachis hypogaea
  source 1..20: mol_type = other DNA
gttgtagaaggcttaaagaa

SEQ ID NO: 4254 - DNA, 20 bp, Arachis hypogaea
  source 1..20: mol_type = other DNA
atatttctgaaggttgtaga

SEQ ID NO: 4255 - DNA, 20 bp, Arachis hypogaea
  source 1..20: mol_type = other DNA
ataagtcataatatttctga

SEQ ID NO: 4256 - DNA, 20 bp, Arachis hypogaea
  source 1..20: mol_type = other DNA
tattttgattttcaatattt

SEQ ID NO: 4257 - DNA, 20 bp, Arachis hypogaea
  source 1..20: mol_type = other DNA
ttattttgattttcaatatt

SEQ ID NO: 4258 - DNA, 20 bp, Arachis hypogaea
  source 1..20: mol_type = other DNA
tatatatatatatatataga

SEQ ID NO: 4259 - DNA, 20 bp, Arachis hypogaea
  source 1..20: mol_type = other DNA
atatatatatatatatatag

SEQ ID NO: 4260 - DNA, 20 bp, Arachis hypogaea
  source 1..20: mol_type = other DNA
gagacatgaatttaaccctt

SEQ ID NO: 4261 - DNA, 20 bp, Arachis hypogaea
  source 1..20: mol_type = other DNA
cttacagataagttgccgaa

SEQ ID NO: 4262 - DNA, 20 bp, Arachis hypogaea
  source 1..20: mol_type = other DNA
acttacagataagttgccga

SEQ ID NO: 4263 - DNA, 20 bp, Arachis hypogaea
  source 1..20: mol_type = other DNA
aaacactacatgaatgattt

SEQ ID NO: 4264 - DNA, 20 bp, Arachis hypogaea
  source 1..20: mol_type = other DNA
atgtagtgtttatttttttg

SEQ ID NO: 4265 - DNA, 20 bp, Arachis hypogaea
  source 1..20: mol_type = other DNA
cttagaatgagataagttaa

SEQ ID NO: 4266 - DNA, 20 bp, Arachis hypogaea
  source 1..20: mol_type = other DNA
caaaaaacaagaaacattta

SEQ ID NO: 4267 - DNA, 20 bp, Arachis hypogaea
  source 1..20: mol_type = other DNA
aatgtttcttgttttttgat

SEQ ID NO: 4268 - DNA, 20 bp, Arachis hypogaea
  source 1..20: mol_type = other DNA
gtttcttgttttttgattgg

SEQ ID NO: 4269 - DNA, 20 bp, Arachis hypogaea
  source 1..20: mol_type = other DNA
tcttgttttttgattggtgg

SEQ ID NO: 4270 - DNA, 20 bp, Arachis hypogaea
  source 1..20: mol_type = other DNA
ttttgattggtggaggaatt

SEQ ID NO: 4271 - DNA, 20 bp, Arachis hypogaea
  source 1..20: mol_type = other DNA
aggaatttggtgttacaaat

SEQ ID NO: 4272 - DNA, 20 bp, Arachis hypogaea
  source 1..20: mol_type = other DNA
aaatcagtcgagctatttga

SEQ ID NO: 4273 - DNA, 20 bp, Arachis hypogaea
  source 1..20: mol_type = other DNA
aaaatcagtcgagctatttg

SEQ ID NO: 4274 - DNA, 20 bp, Arachis hypogaea
  source 1..20: mol_type = other DNA
gactgattttgattataatt

SEQ ID NO: 4275 - DNA, 20 bp, Arachis hypogaea
  source 1..20: mol_type = other DNA
tataatttggaatatttgaa

SEQ ID NO: 4276 - DNA, 20 bp, Arachis hypogaea
  source 1..20: mol_type = other DNA
gcactatttttagagactct

SEQ ID NO: 4277 - DNA, 20 bp, Arachis hypogaea
  source 1..20: mol_type = other DNA
cataattgcttaagttaaac

SEQ ID NO: 4278 - DNA, 20 bp, Arachis hypogaea
  source 1..20: mol_type = other DNA
attttgtttatcttaacttt

SEQ ID NO: 4279 - DNA, 20 bp, Arachis hypogaea
  source 1..20: mol_type = other DNA
aaaaaaaaaaaaaacttatt

SEQ ID NO: 4280 - DNA, 20 bp, Arachis hypogaea
  source 1..20: mol_type = other DNA
aaaaaaaaaaaaacttatta

SEQ ID NO: 4281 - DNA, 20 bp, Arachis hypogaea
  source 1..20: mol_type = other DNA
tattagggttgatgctaaat

SEQ ID NO: 4282 - DNA, 20 bp, Arachis hypogaea
  source 1..20: mol_type = other DNA
tagggttgatgctaaattgg

SEQ ID NO: 4283 - DNA, 20 bp, Arachis hypogaea
  source 1..20: mol_type = other DNA
agggttgatgctaaattggt

SEQ ID NO: 4284 - DNA, 20 bp, Arachis hypogaea
  source 1..20: mol_type = other DNA
acaagttaaggtattttagt

SEQ ID NO: 4285 - DNA, 20 bp, Arachis hypogaea
  source 1..20: mol_type = other DNA
tttcgagttacaacaagtta

SEQ ID NO: 4286 - DNA, 20 bp, Arachis hypogaea
  source 1..20: mol_type = other DNA
actcacattgggtttttata

SEQ ID NO: 4287 - DNA, 20 bp, Arachis hypogaea
  source 1..20: mol_type = other DNA
cactcacattgggtttttat

SEQ ID NO: 4288 - DNA, 20 bp, Arachis hypogaea
  source 1..20: mol_type = other DNA
gttgttgtctcactcacatt

SEQ ID NO: 4289 - DNA, 20 bp, Arachis hypogaea
  source 1..20: mol_type = other DNA
agttgttgtctcactcacat

SEQ ID NO: 4290 - DNA, 20 bp, Arachis hypogaea
  source 1..20: mol_type = other DNA
attacataaaaccttaaacg

SEQ ID NO: 4291 - DNA, 20 bp, Arachis hypogaea
  source 1..20: mol_type = other DNA
gaatctcgcagccacgttta

SEQ ID NO: 4292 - DNA, 20 bp, Arachis hypogaea
  source 1..20: mol_type = other DNA
gtggctgcgagattcatcat

SEQ ID NO: 4293 - DNA, 20 bp, Arachis hypogaea
  source 1..20: mol_type = other DNA
ctcacttctcttctctctgt

SEQ ID NO: 4294 - DNA, 20 bp, Arachis hypogaea
  source 1..20: mol_type = other DNA
ctctgttggaattgctttca

SEQ ID NO: 4295 - DNA, 20 bp, Arachis hypogaea
  source 1..20: mol_type = other DNA
gcagaatgttttataattaa

SEQ ID NO: 4296 - DNA, 20 bp, Arachis hypogaea
  source 1..20: mol_type = other DNA
aaaaattgaactcgtgttgc

SEQ ID NO: 4297 - DNA, 20 bp, Arachis hypogaea
  source 1..20: mol_type = other DNA
gcatgttgatgttatagaaa

SEQ ID NO: 4298 - DNA, 20 bp, Arachis hypogaea
  source 1..20: mol_type = other DNA
ataacatcaacatgcatgct

SEQ ID NO: 4299 - DNA, 20 bp, Arachis hypogaea
  source 1..20: mol_type = other DNA
tcaaaattcagaaaaattca

SEQ ID NO: 4300 - DNA, 20 bp, Arachis hypogaea
  source 1..20: mol_type = other DNA
ttttctgaattttgaagcaa

SEQ ID NO: 4301 - DNA, 20 bp, Arachis hypogaea
  source 1..20: mol_type = other DNA
tttctgaattttgaagcaaa

SEQ ID NO: 4302 - DNA, 20 bp, Arachis hypogaea
  source 1..20: mol_type = other DNA
ttctgaattttgaagcaaag

SEQ ID NO: 4303 - DNA, 20 bp, Arachis hypogaea
  source 1..20: mol_type = other DNA
aattttgaagcaaaggggtg

SEQ ID NO: 4304 - DNA, 20 bp, Arachis hypogaea
  source 1..20: mol_type = other DNA
gaaatccagtagaaataaca

SEQ ID NO: 4305 - DNA, 20 bp, Arachis hypogaea
  source 1..20: mol_type = other DNA
ttcttccatgttatttctac

SEQ ID NO: 4306 - DNA, 20 bp, Arachis hypogaea
  source 1..20: mol_type = other DNA
ataacaaaactgtgtgtctg

SEQ ID NO: 4307 - DNA, 20 bp, Arachis hypogaea
  source 1..20: mol_type = other DNA
cacagttttgttatcccagc

SEQ ID NO: 4308 - DNA, 20 bp, Arachis hypogaea
  source 1..20: mol_type = other DNA
gaacggctatgaaaccagct

SEQ ID NO: 4309 - DNA, 20 bp, Arachis hypogaea
  source 1..20: mol_type = other DNA
cgaacggctatgaaaccagc

SEQ ID NO: 4310 - DNA, 20 bp, Arachis hypogaea
  source 1..20: mol_type = other DNA
aaagaaaaatgaaaaacgaa

SEQ ID NO: 4311 - DNA, 20 bp, Arachis hypogaea
  source 1..20: mol_type = other DNA
ttatttatttatttattctt

SEQ ID NO: 4312 - DNA, 20 bp, Arachis hypogaea
  source 1..20: mol_type = other DNA
gaaggagttcaatgaaaaaa

SEQ ID NO: 4313 - DNA, 20 bp, Arachis hypogaea
  source 1..20: mol_type = other DNA
agaaggagttcaatgaaaaa

SEQ ID NO: 4314 - DNA, 20 bp, Arachis hypogaea
  source 1..20: mol_type = other DNA
tttttcattgaactccttct

SEQ ID NO: 4315 - DNA, 20 bp, Arachis hypogaea
  source 1..20: mol_type = other DNA
gataggtgtcatttccaaga

SEQ ID NO: 4316 - DNA, 20 bp, Arachis hypogaea
  source 1..20: mol_type = other DNA
tatgtaaagatataaatgat

SEQ ID NO: 4317 - DNA, 20 bp, Arachis hypogaea
  source 1..20: mol_type = other DNA
gaaaattgtcatatagaaat

SEQ ID NO: 4318 - DNA, 20 bp, Arachis hypogaea
  source 1..20: mol_type = other DNA
tttgcaacagaataatctta

SEQ ID NO: 4319 - DNA, 20 bp, Arachis hypogaea
  source 1..20: mol_type = other DNA
attaaaaagaaaaagtgatg

SEQ ID NO: 4320 - DNA, 20 bp, Arachis hypogaea
  source 1..20: mol_type = other DNA
tattaaaaagaaaaagtgat

SEQ ID NO: 4321 - DNA, 20 bp, Arachis hypogaea
  source 1..20: mol_type = other DNA
atattaaaaagaaaaagtga

SEQ ID NO: 4322 - DNA, 20 bp, Arachis hypogaea
  source 1..20: mol_type = other DNA
tttttaatatttttattttc

SEQ ID NO: 4323 - DNA, 20 bp, Arachis hypogaea
  source 1..20: mol_type = other DNA
cattaattattgcttggact

SEQ ID NO: 4324 - DNA, 20 bp, Arachis hypogaea
  source 1..20: mol_type = other DNA
gggtcccattaattattgct

SEQ ID NO: 4325 - DNA, 20 bp, Arachis hypogaea
  source 1..20: mol_type = other DNA
caagtccaagcaataattaa

SEQ ID NO: 4326 - DNA, 20 bp, Arachis hypogaea
  source 1..20: mol_type = other DNA
aagtccaagcaataattaat

SEQ ID NO: 4327 - DNA, 20 bp, Arachis hypogaea
  source 1..20: mol_type = other DNA
tatccatgaaaaagtaaaaa

SEQ ID NO: 4328 - DNA, 20 bp, Arachis hypogaea
  source 1..20: mol_type = other DNA
ctatccatgaaaaagtaaaa

SEQ ID NO: 4329 - DNA, 20 bp, Arachis hypogaea
  source 1..20: mol_type = other DNA
ggaccctttttactttttca

SEQ ID NO: 4330 - DNA, 20 bp, Arachis hypogaea
  source 1..20: mol_type = other DNA
ggatagtaaatatataaata

SEQ ID NO: 4331 - DNA, 20 bp, Arachis hypogaea
  source 1..20: mol_type = other DNA
aacattacaacttctcttct

SEQ ID NO: 4332 - DNA, 20 bp, Arachis hypogaea
  source 1..20: mol_type = other DNA
taacctcaaggaaaagatta

SEQ ID NO: 4333 - DNA, 20 bp, Arachis hypogaea
  source 1..20: mol_type = other DNA
catccataatcttttccttg

SEQ ID NO: 4334 - DNA, 20 bp, Arachis hypogaea
  source 1..20: mol_type = other DNA
agaaaagaagattaacctca

SEQ ID NO: 4335 - DNA, 20 bp, Arachis hypogaea
  source 1..20: mol_type = other DNA
atataattcagtcattttca

SEQ ID NO: 4336 - DNA, 20 bp, Arachis hypogaea
  source 1..20: mol_type = other DNA
aggaaatggcaatggatttc

SEQ ID NO: 4337 - DNA, 20 bp, Arachis hypogaea
  source 1..20: mol_type = other DNA
actactaaaggaaatggcaa

SEQ ID NO: 4338 - DNA, 20 bp, Arachis hypogaea
  source 1..20: mol_type = other DNA
aattatactactaaaggaaa

SEQ ID NO: 4339 - DNA, 20 bp, Arachis hypogaea
  source 1..20: mol_type = other DNA
agaatgaattatactactaa

SEQ ID NO: 4340 - DNA, 20 bp, Arachis hypogaea
  source 1..20: mol_type = other DNA
tttagtagtataattcattc

SEQ ID NO: 4341 - DNA, 20 bp, Arachis hypogaea
  source 1..20: mol_type = other DNA
gaaaatatttgcatacatta

SEQ ID NO: 4342 - DNA, 20 bp, Arachis hypogaea
  source 1..20: mol_type = other DNA
cattaaggcattagttttga

SEQ ID NO: 4343 - DNA, 20 bp, Arachis hypogaea
  source 1..20: mol_type = other DNA
tgatgtatcataattgcttc

SEQ ID NO: 4344 - DNA, 20 bp, Arachis hypogaea
  source 1..20: mol_type = other DNA
gatgtatcataattgcttct

SEQ ID NO: 4345 - DNA, 20 bp, Arachis hypogaea
  source 1..20: mol_type = other DNA
acaaaatcatatatcagtga

SEQ ID NO: 4346 - DNA, 20 bp, Arachis hypogaea
  source 1..20: mol_type = other DNA
gacaaaatcatatatcagtg

SEQ ID NO: 4347 - DNA, 20 bp, Arachis hypogaea
  source 1..20: mol_type = other DNA
tgtcattgtgtatttgtgtt

SEQ ID NO: 4348 - DNA, 20 bp, Arachis hypogaea
  source 1..20: mol_type = other DNA
cttgtattagtatacgtgtg

SEQ ID NO: 4349 - DNA, 20 bp, Arachis hypogaea
  source 1..20: mol_type = other DNA
ttgtaaggggcatgattctg

SEQ ID NO: 4350 - DNA, 20 bp, Arachis hypogaea
  source 1..20: mol_type = other DNA
cactataatatagttgtaag

SEQ ID NO: 4351 - DNA, 20 bp, Arachis hypogaea
  source 1..20: mol_type = other DNA
acactataatatagttgtaa

SEQ ID NO: 4352 - DNA, 20 bp, Arachis hypogaea
  source 1..20: mol_type = other DNA
cacactataatatagttgta

SEQ ID NO: 4353 - DNA, 20 bp, Arachis hypogaea
  source 1..20: mol_type = other DNA
cttctttggattttggatgg

SEQ ID NO: 4354 - DNA, 20 bp, Arachis hypogaea
  source 1..20: mol_type = other DNA
caacttctttggattttgga

SEQ ID NO: 4355 - DNA, 20 bp, Arachis hypogaea
  source 1..20: mol_type = other DNA
cacacaacttctttggattt

SEQ ID NO: 4356 - DNA, 20 bp, Arachis hypogaea
  source 1..20: mol_type = other DNA
tacaacacacacaacttctt

SEQ ID NO: 4357 - DNA, 20 bp, Arachis hypogaea
  source 1..20: mol_type = other DNA
agaagttgtgtgtgttgtag

SEQ ID NO: 4358 - DNA, 20 bp, Arachis hypogaea
  source 1..20: mol_type = other DNA
gagcatgaagagtgtgtcaa

SEQ ID NO: 4359 - DNA, 20 bp, Arachis hypogaea
  source 1..20: mol_type = other DNA
agagcatgaagagtgtgtca

SEQ ID NO: 4360 - DNA, 20 bp, Arachis hypogaea
  source 1..20: mol_type = other DNA
gcatgcatcttctataatga

SEQ ID NO: 4361 - DNA, 20 bp, Arachis hypogaea
  source 1..20: mol_type = other DNA
catgctttcttgtcaattga

SEQ ID NO: 4362 - DNA, 20 bp, Arachis hypogaea
  source 1..20: mol_type = other DNA
atgctttcttgtcaattgaa

SEQ ID NO: 4363 - DNA, 20 bp, Arachis hypogaea
  source 1..20: mol_type = other DNA
catcactcatactagtcact

SEQ ID NO: 4364 - DNA, 20 bp, Arachis hypogaea
  source 1..20: mol_type = other DNA
caccaatttccaaacacatg

SEQ ID NO: 4365 - DNA, 20 bp, Arachis hypogaea
  source 1..20: mol_type = other DNA
atttgaatgccacatgtgtt

SEQ ID NO: 4366 - DNA, 20 bp, Arachis hypogaea
  source 1..20: mol_type = other DNA
tgccacatgtgtttggaaat

SEQ ID NO: 4367 - DNA, 20 bp, Arachis hypogaea
  source 1..20: mol_type = other DNA
aaatagagaaaagaaaagaa

SEQ ID NO: 4368 - DNA, 20 bp, Arachis hypogaea
  source 1..20: mol_type = other DNA
tttcttttctctatttttat

SEQ ID NO: 4369 - DNA, 20 bp, Arachis hypogaea
  source 1..20: mol_type = other DNA
ctatttttataggattccca

SEQ ID NO: 4370 - DNA, 20 bp, Arachis hypogaea
  source 1..20: mol_type = other DNA
ttgaagttctattatgcctt

SEQ ID NO: 4371 - DNA, 20 bp, Arachis hypogaea
  source 1..20: mol_type = other DNA
tttgaagttctattatgcct

SEQ ID NO: 4372 - DNA, 20 bp, Arachis hypogaea
  source 1..20: mol_type = other DNA
ataatagaacttcaaataac

SEQ ID NO: 4373 - DNA, 20 bp, Arachis hypogaea
  source 1..20: mol_type = other DNA
accagaaaaacagcaaagaa

SEQ ID NO: 4374 - DNA, 20 bp, Arachis hypogaea
  source 1..20: mol_type = other DNA
tcctttctttgctgtttttc

SEQ ID NO: 4375 - DNA, 20 bp, Arachis hypogaea
  source 1..20: mol_type = other DNA
ctttgctgtttttctggtca

SEQ ID NO: 4376 - DNA, 20 bp, Arachis hypogaea
  source 1..20: mol_type = other DNA
ctaactctttctttctacat

SEQ ID NO: 4377 - DNA, 20 bp, Arachis hypogaea
  source 1..20: mol_type = other DNA
tttctttctacattggtaac

SEQ ID NO: 4378 - DNA, 20 bp, Arachis hypogaea
  source 1..20: mol_type = other DNA
gagctttaacaacacaacaa

SEQ ID NO: 4379 - DNA, 20 bp, Arachis hypogaea
  source 1..20: mol_type = other DNA
agctttaacaacacaacaat

SEQ ID NO: 4380 - DNA, 20 bp, Arachis hypogaea
  source 1..20: mol_type = other DNA
aacaacacaacaatgggagc

SEQ ID NO: 4381 - DNA, 20 bp, Arachis hypogaea
  source 1..20: mol_type = other DNA
aacacaacaatgggagctgg

SEQ ID NO: 4382 - DNA, 20 bp, Arachis hypogaea
  source 1..20: mol_type = other DNA
acacaacaatgggagctgga

SEQ ID NO: 4383 - DNA, 20 bp, Arachis hypogaea
  source 1..20: mol_type = other DNA
ctcaaaagaagcctctttca

SEQ ID NO: 4384 - DNA, 20 bp, Arachis hypogaea
  source 1..20: mol_type = other DNA
gaatgtggaacccttgaaag

SEQ ID NO: 4385 - DNA, 20 bp, Arachis hypogaea
  source 1..20: mol_type = other DNA
tcaaaagaagcctctttcaa

SEQ ID NO: 4386 - DNA, 20 bp, Arachis hypogaea
  source 1..20: mol_type = other DNA
ctgaatggagggtttgaatg

SEQ ID NO: 4387 - DNA, 20 bp, Arachis hypogaea
  source 1..20: mol_type = other DNA
gttggccaacactgaatgga

SEQ ID NO: 4388 - DNA, 20 bp, Arachis hypogaea
  source 1..20: mol_type = other DNA
agttggccaacactgaatgg

SEQ ID NO: 4389 - DNA, 20 bp, Arachis hypogaea
  source 1..20: mol_type = other DNA
ttgagttggccaacactgaa

SEQ ID NO: 4390 - DNA, 20 bp, Arachis hypogaea
  source 1..20: mol_type = other DNA
tcaaaccctccattcagtgt

SEQ ID NO: 4391 - DNA, 20 bp, Arachis hypogaea
  source 1..20: mol_type = other DNA
gtggaattgctttcttgagt

SEQ ID NO: 4392 - DNA, 20 bp, Arachis hypogaea
  source 1..20: mol_type = other DNA
gaacgttcaaagcaatgtgg

SEQ ID NO: 4393 - DNA, 20 bp, Arachis hypogaea
  source 1..20: mol_type = other DNA
agagaacgttcaaagcaatg

SEQ ID NO: 4394 - DNA, 20 bp, Arachis hypogaea
  source 1..20: mol_type = other DNA
taagagatcatagacaacat

SEQ ID NO: 4395 - DNA, 20 bp, Arachis hypogaea
  source 1..20: mol_type = other DNA
tgttgtctatgatctcttag

SEQ ID NO: 4396 - DNA, 20 bp, Arachis hypogaea
  source 1..20: mol_type = other DNA
ggcaatgtagaagagtaagt

SEQ ID NO: 4397 - DNA, 20 bp, Arachis hypogaea
  source 1..20: mol_type = other DNA
aagcttgtggaaataagtgg

SEQ ID NO: 4398 - DNA, 20 bp, Arachis hypogaea
  source 1..20: mol_type = other DNA
tggaagcttgtggaaataag

SEQ ID NO: 4399 - DNA, 20 bp, Arachis hypogaea
  source 1..20: mol_type = other DNA
aaaatgggtatggaagcttg

SEQ ID NO: 4400 - DNA, 20 bp, Arachis hypogaea
  source 1..20: mol_type = other DNA
gcaaggaaggaaaatgggta